United States Patent Application Publication US 2019/0093148 A1 - sequence listing, part 3

SEQ ID NO: 1 - DNA, 5241455 bp, Serratia marcescens WW4 (residues 3,494,305-5,241,455 of 5,241,455)
ccgccaggagattgcgctgggctcgctgcacctgctgggcacccgcgacggccccaacgtgcgccgttccttcgatgctatccgcgccagctgggtcaaggataaaaaccgcctcgacgcctttatcggccatcccgtcacccttaaaaccggcagtttcgacgacgataccgacaacagccaaaaggtgtggggactgtacggcaccacgccgctgacgccgctggcttcttcgctcgatctctacacctttggctttgaggataacgacgcccactacgcgcagcttagcgggcaagagcggcgctataccgtcggcgcacgcattttcggcgcagcgcgggggttcgactgggataatgaagctgcctggcagttcggcagcgcagaacagcgcgatatccgcgcctggtcggcgtcggcgcacgccggctatacggtgagcgactggcgctggcagccgcgctttggcggcaagatcggcatcgccagcggcgacaaaaacggtcacgatgggcagctcaacaccttcaacgccatgtaccccaagctgccctacctgaccgaaaacgggctggtggcgccggctaacctgatcgccatccatccttcggtcaccattacgccgtggcaaaccctggccatcgatttcagctgggacgccttatggcggcaacgccgcgaggacgccttctatctcgggccaatgcgcccggtgaaaggcagcgaacagggatcgcgctttatcggcaaccagtaccaggtcgaaaccacctggacgccgagaagcgatctccagttcaaggtagcctatgtctacttcgacgtcggccacagcctgcagcaccatgccgggctgaaagatatgaacttcgtgctggcgcagggcacctacagtttttaagcatcaggcaagttaatcggtgtacgcgggccccctcaataatcccgtatccgattaatgacgacagccggcgtgcggccgcctctatgcgttacggcaatggcggctactcaccgcatttcacagataaaaagctggaaaaacagaaagataaatcagcaacgcaaatgccgcgcgccgattacagagaaatattaaataaagatttaattccaacgagttatttaaacaagtcttttactcatatcttatgtaaaagattcatataagaataactaattaataaaataattgtgtttatactgttttaactcaatcgcagtgcacaattaattcctcaccgtgattaatgataaggatatattccgcttgaacgcaatattcaagccagaccaaggaggcaagccaatgatatcacattaattatccctgattttcaaacctgtgtacgagcatatagagcgttaggtgcaatattgtcaacgtccaaaggagtttgatatgtcattagctaccgataagatttccgattatttaaccagttatgaaagaggcgatcacgcggagagcagtaaaccgtcatataccacgcaagaggtttcagatctgctgctgagaagccattattccgccaatggcaaaggcgtgacagaccatgcggctaccttgacctactctttccccgtctataccggcagcgacaagacgggcgccgcgcagcttaccgccgctcagcaagcccaaaccaagctttcattgcaatcctggtcggatgtggccaacatcacgttcaccgaggttaaaggcaacgacgcgaaaaatgcagatataaagtttggtttttataaggcggccagcgggggcaattacacctcgtatgaaagtacgcagagcgatctcaaaagcaccatctggatcagcggtaataacggctacgacgcctccaatccgcaaaccaataactacgccagggatacgcttacccatgaaatagggcatgcgttggggctttctcatcccggcaattatgatgcgtcaaatgccacctaccccacctacgccaactcggcgaagtattatgaagacgaccatcaatattctttgatgagctattttaacgaacaatacaccagcgctgactataaaggcgtttggccatcaggaccgcagctggatgatattaccgccatacagaagctttacggcgcgaataccaccacgcgcaccggcgataccacctatggtttcaactcgaatacggacagagactttctgagcgttaaagcgtccacggacaaaatcgtggcggctatctgggatgccggcggcaatgacacgctggatttttcaggctacagccaggatcagcgcatcaacattaacgaaggcgcattctctgatgtaggcggcttgaaggcgaatatcgccatcgcctacggcgcgcagattgaaaatatcatcggcggcagcggtgccgacattcttgtgggcaacgcgctgaacaatacgctaaaaggcggtgcaggcaacgacatcatttacggtgccggcggcgccgatcagctctggggcgatgcaggcgcggacaccttcgtcttccgcgcagccggcgacagccaagccgccgcaccggactggatccgtgatttccagacggcggtggataaaatcgatctgtcgtggctcaaccagacggctaaggcagaagggagcgagttgcacttcgtgaatagtttaagcggctcgttgtatgaagcggcgctgaattatgactcgcagcagaatgtcaccgatctggccatcaatctctccggcaatcaactgcctgatttccttgtaaaaatcgttgggcaggtcgacgcttccgccgatattctcgtctagccaaggcaaacccgcagtccggcgcgaacgccggactgtttatttcttttcaggcctgccgctggcgttttttgcgcggttcccatatcgccaaagcagtaaatgggtgtggggagcaacggaacaacaaacgcacttaagcagtcaatttaaatgactattaatctataaatcaataagttatcacgtcatcgccagaaatcatccgttcttctttcttgtctcagtcatcacacagcaaatgatagtcattatcatttgatatctattcctgatgctcataacctactgttcatgcatacagttttcgtaatttttaaccatcctcgccttaaatgcgcagcgtcgttaactgtctgtaaagcgttaccatgtgccatttccatggcaggaacttattaataaaccgaggaattatcatggctgaacaaaagaaaaatgcccaggtacagagtggcgtcaacgacgacatcaccgaactaaagtcgctgactacattgcgcaaacgggtcgtcagcgacggtgaaatcgtctcaaaatctgccaacggctttcgactggccaacggcaacaccggcgtgatgttgcgtaacgacggcgaggctttctacttactgacaactcaggctgggcaagctcaaaacggacaatggaacacctcgcgtcctttcgctttcagcctggcttccggcagggttgcactcggcaacggcgttgatatttccggtggtgcgatggtatcgcataatgccggcatctccaccgcgaccaccggtccagcaccacttattaatgggcaaatctatgatgcggctgccgtacataccaatttcaccagcggtaacgtcactacggccatgttgatggggtcacgcgtgatcgccggcaaagaggattatggcctgctctcttaccgcgactggcagggaaactggaacgaactccaggtcaggccgaatgccgaattgtcagtaggacaactgattaagcgtaatgctaatggatggatttgggcggccggtaaccagaatgtaaacaataatgcagaccgcattaccaacggtatgcatatacagggtgcaggcgacctgtcagccgatttgtaccactacgagcgcatcggcaaacaccacatgctcgcgttgcacgtggccaatggcggcgctgatggttggtatgaattccgcaatgatggccatgcctacaccaatggcgcctggaacagcagctcagatgtccgcatgaaaaccgatatcacaacaattgacggcgcattggacaagctggccaatatcggtggttacacttacctcaaacagggcgtgccggaagccggggtgattgcacaggaagtggaagaaattctcccccaatccgtgacccagaccgagctgaaactcaatgacggcagcgtgctgaaagacgcccgcagcatcaatatcaacggcgtagtggcgttgctggttgaggcgcttaaggaagaacgctcactgcgcgaagcagaacgagaaacttttgaaacacgactggctgctttggaaaaaggcattgaacgcgcctgattaacaatattgcagtggtttgcactaaatacctctcagcgcctttacaggcgagtaccgcgcttacaatacgatgacgaaaaggaactcaatgatgaatggatttaattacggtgatggtaaaggaaggaaacgtcaaggcggtgtaaatgcagaagctgcttcccggttcagtaatgtctgcgttattcgcagctcggcagcgcgtcgattacatcgttctatttgaagagggatcggattatgacacgatatgaagatacaacgcagtatgaacgcgatgtaatgacttcaatgggatacaactggaatggacatgggtggcaacgagggtttgacttatcagatggcaatatggttgtagaagcatgggttggcgagggtttacctgatagacagaaggaattaagtagtattacccatatctgggatcaaaaaatttccgatattaataaaccgataagtgcttttgatcctgaagatgatgatatcaggccattcagcaatgaagcgaaagagagttatcgtgaggattcggacaaagccattcagttttacgctaataaagtcaatgaaattgacaaccaaattaaagaaattcaaaaggatattgatgcattaagcaagaaagctgaaagcagtcaacttagtgaattcgagaaagcaaacctaaaagcaattattagtaagttaaaggtaagcaaagaacgtcttaccattcttcgaaacgaagctaataaaagaagagtacatcaggaatatttaaagctgaataatgaaagctggttcttctctagagagaaacctacaccctgggttagagaacagcaatcattgaccagaaaagagatgggtaacaaactggaagaagagaagagaatacaattagaaattgacgcagctaaacaaaatattgaacatttagaaagtgaacagcgcgagaaggaagaggatgtccgcaaagctgatgaggctcgtaaggctgaggaaacgcgcaaagctgaggaagcccgtcgcgctgaagaagcccgcaaggctgaagcagcacggaaagcattgttcgccaaagccggcgtactggacgccccggtctatacacccgacatgataaaagcggccaatgccgcgttggccacggccggggtcatggtgctcaaccgcgcgggcggtatggtacaattatcgacatggggcaacagtgtgatgaccaccgccagtgagctggccggctgggtatccagtgccgtgtggcgcggcgccgtcgaagtttcccgggttgccacgctcagtgcggtagctccggcagtcggcgccttcgttgtcggattctggccggggaaagtcggtgaaagtcagagcgatattgataaattgctgggccgtgatttgacacagatgtttaccgttccggccagcctggttgccgcagggaaaacacagatccagccggaaatgaccacggtcgatttgccagtgcgcgggtttattcgccgagggaataacggtcagcaagaggtaatactggtcaaaacaggaacgggcggcgtctccgctactgtgccggtgtatcggccggttcgcgatgaaaaaaccggcctggaccggataaccttgccggcggtggccggtgcgccggggcgaaccattttgataaacccgggcgctgccccgtcgggtccgtggcataccggcaatcctgcgcctgcagcgccggtaacgccggtgcataccggtacggagataaagcaggccgacagcatcgtcacgacgacgttccctgcagataacatgccactgcaggattttatctactggcagcctgatgcaacggggaccggcgttgagcctgtctatgtcatgctcagtggtatctatggtgaaaccaacgctaaagggcaatacagtggtcgcgactacaacacggacaaggccggtgggccaattcagaatctggactggaaaaccgccaccattgaccgcgccggcgtggacaaggtgaagctgcataccgggcggtttggcgaatctcccgataacaaggtgatgattgaccgcctggaaaaaatcctgaagggagcagtacagcccaccgataccgacaagcgtttttacacccacgaaatcagggaattggagcgttatagagcaattggtgttcctgatggaatatcacctgatgacgatggtgctacgtggaataacactcatacggcgacgttggaagattacaaattaagtagcgatcgctctctgttatatacaccagaagcattaaaagctggtgatgaataaatctagaggctatatatgattgattttaaacctatgtttgaaaatgaacaaatccgagacatagttttattcttgtcgggacgaaaagaaaacgggatatctcatcctcaattagatgggtattgcactatgtatggtaataaacgtatatcaaacattgaactgatttcattagtgaaaagtatgcgagaaaaaggggatgtatcatctaatggaaaaggtggctataaaagaggtccaaactggaaagaacctgcattcgtaaccgagaaaaaatacggtattgagtaattaccagtgccttccataagtgcgttttaagcagcgtccaacaaacaagagtttgttggacgttttcgttgatagctaattccacgccagattggttttcagtccagcccagggtcagaaaacaacggttttggctccgttgctccccccaaatcgcgcagacgagctcacaccgcttccagctccgccgccagggtggcgaccagctccgccgccggcatcggccgcgccaggccgacaccctgcccggcccacagcgacataaactccccgcgcccggccttggccgccgcctggcggatatcgccggtgagcgcgttctgcaccggataaggcaggatctgcgcctcttccgcgcgcatctgccgcatgaaatcattgacgatgccgcgcgccgggcggccgctgaaggcgcgcgtcaggcgcgtgctgtcatcgccggcgttgctcagcgccgcccgccaggcttcggcgatgcccgactccgggctgcacagaaacgcggtgccgagctgcgccgcctgcgcgcccagcaattgcgccgccgcgatgccgcgcccgttcatgatgccgcctgcagcgatcaccgggattttcaccgccgccaccacctgcggcagcagggccatcagcccgacgcaggattgttcgatatcgccgaggaaggtcgggcggtggccgcccgcctccgagcctgagacgcaaacgaagtcggcgcccgcctcttcccaggcgcgggcttccgccaccgtggtggcggtgccgatcacccgtgaaccggccttcttgaactgcgtgaccgtggcgcgcggcagcacaccgaaggtgaagctgaccaccggcggcgcagcctccagcaaggctgcgatctggtcgcggttgttttcggcgaattgagtggggatcggcggctcgctcaaccccagcgcttcgcggaacggccgcagcaggtgctgggcgcgcttcagttcggcgagatccgggtgctgctcattgagcagaaacagattgatgttgaacggcgcggcggtctgcgcgcggatctgctgcacacgttcgaggatcagcgccggtgaaaacagcgccgccgcgcacgatcccagcgccccggcgttgctcaccgccaccgccaacgccggcggtgacgcgccgttcatcggcccctgaacgatcggatagcgcagcccaagctcgcgggcaaaagcagaaggtgccgtcatcaatgtgtctccctgtactgactacattcgtcttacggcggccgcgccgccgaaccgaccaaaagcatagcaccttctcaccgcctggccgtgcagttaatgcttcacctgccgcctgtccaacgacaggaagtgatgcaccaccggtttctccgggccaatatggaagcgcagcgcctcctgctgcagatcggcgtcggcgtgcgacacccgctggtgctgccgcagatgctccgcccaggactccaccaggaaccactccatgatgcattccggatcgccggtatgctcggtgataccccaggcgtaagcgccatcgcggcggcgcgcccgctccagcatcagcagcgtgcgcaagaactgcgggcgatcctgttcgcggatgcggtactccacctgaatcattaccgggccgcgatcgttttcgaccggcgtgttgaccaacggttccggccaatggttcgacggctgcagatcggcctcaccggtcggcagacgcaggcggtggaacagcagccccgccgccaacaggccgacgccgccgaccagcagcgtggcggccacgcccagctcctgcgccaccagcccccacagcaggctgcccgccgccatcgcgccgttgaacaccatcaggtagatggccaggccgcggccgcgcacccagttgggcagcacgccctgcgccgcaccgttgagcgtggtcaacgcgataatccagcctgcgcccagcaccaacagcagcaccaccgccagccactgcggcggcgccagcgacagggccgccatcaccgccgccgtcaacaccgccgccagcaacaccagcccgtcggcattcagccgctgacgcaggcgcggcagcacaattgccccgaggatcgccccggcgcccaccgcccccagcaaaacgccgtaaaagccggcgctgccgcccagcatgcggcgcgccaccagcggcaacagcgcccagaccgagctggagaaggcgaaaaataccgccgcccgcagcagcaccacgtgcaactcgcggctggagcgggcatagcgcaggccggcgcggaaggcgccgaagaagtgttccgacaggccgctgtcctcaaccttcggccgcttccaccacagcagcgccgcgatcaccagcacatagctcatcacgtccgcgccgtaggccgcgccggcgccgaagctggccagcagcagccccccggccgccgggccgatggagcgagcgatgttgatgcccagcgagttcagcgccacggcgtttttcagctcggcgcgcggcaccagctccggcacgatcgcctgccaggtcggccccatcagcgccgcgccgatgccgccgacgaaggtcagcgccagcaggtattccaccgtcagcgcgccggtctgcgacagcaccagcaggctgccgctgacgcaggccagcagaatttgcacgaagatcagaaagcgccgccgatcgagaatgtccgacagcaccccggccgggatcgccagcaggaacaccggcagcgtagcggcggtttgcatcagcgccaccgccgaagggttgctcgacaggtcagtgatcaaccacgagctggcgacgtcgcgcataaagctgccgacgttgccgagcaccgtcgcgccccacagcaccgcaaataatgggattttcagcggcgcgaagccgcccgccgccgccttgttttccgtctgctcagccatctgttcgctccttcaaatcgttaaatgccaccagcaacagcgcgccggccagcccaaggtgttcaaaaaatccgttcatcatctggccgcgctccgccccgtcgaactgccagaacggattggccatcagcgtcgccatcagggtaaaaccggccagcgccagcgcgccgagccagcgataaaagccgctcaggatcagcgccgacgcagccagttccagcagcgtcaccagcacggcgaacagcgccgccggctgcaggccgaagtggctcatctcggcgaccgcgccttcgacgttcagcgctttgaccaacccgccctgaatataggcggcgcaaatggcgagcagcagcagccagcgcaccacaggcgcatgcagccgctgtgcgcagcgggcggcgatagcagtcaggttcatcgcgcccccttaaaacggcgaattttggatgaaggccagcagatcggcgttgaagcgatcgggatcgatctgcgccaaaccgtgcgaaccgccggcgtaaacattcagctccgcctgttgcataagcttagcggctttcagcgccgaggcgccgatcggcacgatctgatcggcgtcgccgtgcaccagcagcgtcggcttgtcgatcgccagcaggtcggcggtgtaatccacttcggagaacgcgcgcacacactcgtactgccctttcacgccgccctgcatgcccatcagccagaagtggtcgatcagccccgcattgctctccacctcgtcgcagtggaggccatagaacggcaccgccaaatctttgaagaactgcgagcggttgcccgccacgccgctgcgaatgccgtcgaaggccgccatcggcgtaccctcagggttgaccggcgtttgcagcatcagcggcggtacggcgccgaccagcaccaccttcgccacccgatcgctgccgtgacggccgatgtagcgcgccacttcgccgccgccggtggaatggccgaccaggatcagatcgcgcagatccagcgtttcgatcagcagggccagatcgtcagcgtattggttgatgtcgttgccgtgccaggtttgctccgaacggccgtggccgcggcgatcgtgggcgatcacgcggaatccgctctggccgaaaaacagcatctggttgtcccaggcgtcggcagacagcggccaaccgtgggagaacaggatcggctggccgcggccccaatccttataaaaaatgcgtgcgccatcgggcgcggtaagggtgctcatgacgtgttccccgctcggtatcgaattggattttgtacgggttaacagtacggcaggcgtaaaggtagtgataacggaataattttcgcatgatcgcgagtttttttgctgaagaagccggcgtcgccgccggcgcaaaacgtcagatgttttccagatcgataccgcgcgtttttgggccaaacagcccgatcaccagcatcacgatcagcatgctggcgacgataaacgcgatcacccccagcgaaccgccgtactgcaagataatgccgatgatgatgctgctgaacaccgtcgacagccggctgaaggagtagcagaaaccgacggcgcgggcgcggatatgggtcgggaagatctcggattgatacgagtggtagctgtaggtcagccaggcgttggaccaggtgatgaagaaaccgcacaggatcagccacagcgggttgttctgcagtgcgaacagcgagccgaagatcaccgtcaccaggcaggacaacacgatctgccacttgttctccatcttgtcggcgtagaagctgcacagcagcgagcccagcgggtaggccagcgtgataaagaaagcgtacagcaggctgtgggtgaccgaagcgcccttgcccgacagcagcgccggcagccagttgccgaagccgaagaagccgatggcctgaaagaaattcatcactaccagcatcagcgtgcgatcgcgatattgcggcgcccagatgtcgcgaaagcggccgcgcagcggcgctccctcggcatcgtccaccgggcgcgacgggaagtccgcggccgccacgccgcagcgccgctccatgtcccgcatcacctgccgggcctgcgcatagcgccgctgttgcaccagccagcgcggcgactccggcagccccttgcgcaccaaccaaatcaccagcgaagccagcgcgccggcgatcaccacatagcgccagccgctcagcccccaaatcgtctgcggcaccagccaccaggacatcagcgccaccgccggcaccgacagaaactgcacgaagaacgcgaaggcgaaagcccgggtgcgcaagtgcgcgggcacccactccgtcaggtaggtatcgatggtcaccaactcgatgccgagcccgacgcccaccagaaaacgcagaaagatcacccattccgcctgctgttgaaacgccaacagcagcgagaaggcgccataccagatcagagcgaacataaaggtggcgcgccggccgaagcgatcggcgtacgggctcagcaggctggcgccgacgaacaggccgagaaaggtggcggaggcaaaggccgcctgatccgacacgccgaaaacgccctgcgcgccggtgtggaaaatgccgtcggcgataaggccagtgctgatatagccggtctggaacagatcgtagagttcgaaaaagccgcccagcgacagcagaatgataaagcgccacaggccggccgacgcgggcaaggcgtcgattctggccgccaaatcccgcgcatggatcggcgacgccgctacagattcactcaccattaacctcgcattaacatttttgatgactttctatgctagcgaagcggcgtcggagttaaatttttaattagcagactatgaaaaaaagttaagcataaaacgctgcagcagcctgttttatagcaggaaaatgtagcgcgggatgccacagcggcatcccgaatcggcaggttaacggctgtggtggtgctgcagccgttcgctgcggtagacgctcaacaggcaccagccgagggcgatcagcgccagcggcgcggcgacgaagccgatgttgcccatgcccagatgcaggctcacctggttgcccagcagcgcgccgctgccgatgccgaagttgtacaggccggagaaaatcgccatcgccacgtcggtagcgtccggcgccaggctcagcactttggcctgcatcgacaggccgatcgccatgatcgccatcccccagaagatgcacagcaccgtcaggtggctttcactgccggccgccggcaacagcagcagcaggctcaaggccagcagcgtgatggcaccgatgaagaagccggaaggaaaccgctcgctgtagcggctgaacagcaggctgccgacgatgccggcggcgccgaacagcagcagcatcagcgtggtgaagttctccgacagcccggccacggtctggataaacggctcaatgtagctgtaggcggtgaagtgcgccgtcaccacaatgatggtcagcatgtaaagcgccaccagcgccgggcgcttgaacagcagcggcacgctggccagcgaaccggaatgctcgcttttcagcaccggcagcaggcgccacagcagcaccagcgccagggtggcgcacaccgcgatgccgataaaggtcatgcgccagccgagcagttgcccgaccacccgcccgagcggcagcccgagcaccatcgccagcgcggtgccgcccgccagcaggctcagcgcctgggctttcttgcctggcggcgccacgcggatcgccagcgaggcggtgatagaccagaacaccgagtgcgccagcgccacaccggcgcgcgaaatgaccagcgtggtgaagttccaggccacggcggtcagcacgtggctggcgataaacagcacgaacacgccgatcagcaacttgcggcgctcaatcttgctggtcagcagcatgcacgccaacgaggcggcggcgacgatccaggcgtaaatggtaatgatcaagccgacctgttcggtttgcatcgagaagctggcggcgatatcgctcagcagaccgaccggaataaactcggtggtgttgaagataaaggccgagacggcgaggataaccacgcgcaaccaggcggttgagcgcgaaacgggagcgtgttccatggtaaacaaaatccggacaggtgcgggcaagtcgcgatattttaaccaaccggcccgctaaatgcgatatacgtcacactttaattgtgtggtttttttcaccgcccatcgacacgctcaccgacgcacggttgccaaaatgctgtgctaatctattgaagcgtaccaatttttcctgccgttcttcccaggccgtccacgcgccgcgccgaagaagcgcgcagtgtccctttggcgtttcctgaggcgaggtcattatgatgtccgcgatttatgattggtccgtgctcgcattgcgcaatgtttacgatcgccgcattcagggcaagccggtgctcgacagcgccgcgctgttccccgacgccgaacgtttcaccgcccaatggcggcagatccgcgaagaggcgctgaccgtcgcccacgatctgcacaatattccccgttttcacgagatcatgagccagcaggcgtcgatctccgccaacgacgcgcgcgactggcgcatgttcatcatgaaggcctacggccagcccatcccccacaacctggcgcgctgcccgacgctggcggcgctgatcgcttcgtcgccggacgtgctgtccgcctcgctctccttcctggcgcccggcaaacaggtgccgccccatcgcgggccgtttcgcggcattctgcgcggctatctggtgctggacatgcccaaacgcgccgacggcgcgccggcggcggtgctgaaagtggacggccgcgaataccggctgcacgagggggagttcatgctgtgggacgataccttcgaacacgaggtgtggaacgacagcccgcaggtgcgcaccgtgctgctgctggacatccgccgccgcgacatgcccgccgggctgcggctgctctccagcgccatcatcgcgctggtgcggctgaacgtgcgctggatgcagcgccagttctgactgcggcgctcaggcgattaaccgccctgagaagccagccactgctcggcggtagtggtggctatgccctggcgcgcattgaaggtttttgccttatcccaggccacgccgtcgggccgggcgaaagccagccggtatttggcgccgacatcatgcggatgattgcgcacctccgcctgcagccgctctttgtccaacaggatcctgttgacctccacgccccagtgcgcctgcataagatcggcaagctcgcggtaggtcagcgtgtcgccggcgatatagaccacctggttgcgaaacgcgggccgatggaaaaaaatcgcggccgtcagccggccaatgtcctcaggggtggtcagcgtcaccgcgtagcgccagtcgcccagcgcgcgcaccgttttgcttgccgcatccaccacgccaaagccggggtcaaacaggtagctggtgaaaatgcccgtggaaacaatcacccactccgtcgccttctgcgcacgcagcaggtggcgcacctcaagctgttcatcccacacctgttgcccgctgcctttacccacgacatcgtagtccacgccgaactgccacgggaagtagcgcgccacgcccgccagcaagacggcctgggtgatctttacctgcgtgcccgccccgccgacaaagccgctgcagttgatcaccgcgtcgaaggaacggaatagcgcgctcagcgcctccacgccgttttgctgcagatcgccttccaccacggcgatgccgagccgcgccagcgcatcccgccgcgcccggagcgggccgctcacggcgcgtgcagcctccggccggagcagcacgctgatttttaaagatggagataaccgagcctgccggctcatcgcacgcaataccggcagccccagttcaccggcgccgagtatgagcacggcattgatagatggatttgtggatttcattcttgcctcctgtcttgacactgcgtcatcctgacagctgacaaaaacgggttcaattaggtacacgcgtgataccggagaggaatatgacgagcgatcgggaagcgctgctgcaattttcgcaggcgttctgtgaagaactgagcaacgacgatgaagggttgaagcgtgagatcctcgcgcatgcgggcaaccgttggtcgctgggggtattgcatatcctgggcactcacgggccgctgcgccacggcgagataagccgccaactggcgggcgtgacgcagagaatgctgacgcggacgctgcgccatctcgagcgggacgggctgatatcgcgctgcgattatcaggagaaactgccccgcgtggtttacaccatcaccgacgcgggggaagagatgctgctcaacatgctgccgctctggtcgtggattatcgcctccgccgacgccttcagagcggcccgttcgcactacgatggccaagagcgcaacgccgctgaaaaatgaacgcgggcatccctgcccgtggggcggcgctcagccgccgcccagataggcctttctcacctccggatcgttcaacagttcttccccgctgccggtgaggcggatctggccgttgaccatcacatagccgcgatcggacagtttcagcgcatggttggcgttttgctccaccagaaacagcgtcatgccgctgcgggtcagttcgcgcagcacgccgaagatctgccgcaccacgatcggcgccagccccaggctcggctcgtccagcagcaacagcttcggccggctcatcagcgcgcgggcgatcgccagcatctgctgttcgccgccggacatggtcatcgcccgctggttgcgccgctccttgaggcgcggaaacagttcgaacatgcgcggcaagtcctcctccaggtagcgattgccgacggtgatggtgcccatcagcaggttctcctccacgctcatgtccggaaagatgcgccgcccctccggcgcctgcgcgatgccgctgctggcaacaaagtgcgtggagcggcggctgatgtcctcgccgcgaaacaggatctgtccgccggcgatgcgcggctgaccgaagatcgacatcaacagcgtggacttgcccgcgccgttggcgccgatcagcgccaccgtctccccggcgtttacctgcagcgacacctggcgcagcgcctggatcggcccgtaaaacacatcgacctcgcgaaattccaacatcgcttcgctcatcccgccagctcctcttcgtccgcgcccaggtaggcggcgatcaccgcctcgttgtgctggatctcctgcggcgtgccgcgggcgatcacatcgccgtgatcgagcacgatcacccgatcggagatctccattaccatgcccatgtcatgctcgatcaacagcaccgtgatgccgtgatgctgccgcaggaagcgaatgatgcggctcagcgtggccgtttccaccgggttcagcccggcggccggctcatcgaggcagatcatctccggcgcggtgcacatggcgcgcgcgatctccagccgccgctgctggccgtaagacatctctcccgccagccggttggcgcagctcaccagatccaccacctccagccagtagaaggcatgatcgagcgcggcgctctccgcccggcggtagcccggcgtattcagcaccccggcgatcaggttacggttgctctgcatgtgctgcgccaccagcaggttctccaccaccgacatttcgcggaacagacggatattttggaaggtgcgcgccagcccggcgcggttcaccaggtgggtgccgccgaacatcttgtagtagaggcgcgaaccgagccgctttggacgtatccagtcgccggcgcggaacttctgccccagcacctggatcacgtcggtcggccgcttgtgggtattgagcaggatcgcgccgccgctggcgcggtaaaagccggtcaggcagttgaataccgtggtcttgccggcgccgttggggccaatcagcgcggtgatggagccgcgttccacctccagattgacgtcgttcagcgctttgatgccgccaaagtgcatcatcaggtgttccacccgcaaaatggcgtcgctcatggcgccacccccttgcgttcggcgaagctggatcggctgatgcgcaccagcccgcgcggccgccagatcatcatcgccaccatcagcacgccgaacagcagcacccggtattcggcgaagctgcgcagcagctccggcgccaccgtcagcacgaaggccgccagcaccacgccgagggtggagcccatgccgcccagcaccacgatcgccaggatcagcgccgactcgaagaaggtgaacgaagtcgggttgacgaagccctggtaggtggcgaaaaacacccccgccagcccggcggtggaagcgccgagcataaacgccgacagcttcaccagcacgtgattcagccccagagaacggcaggcgatctcatcctcgcgcagcgcctcccaggcgcggccgatcggcatgcgcgtcagccggtgcttgatatacagcaccagcagcaccaccaaaaacagcaccgcgtagatgaaaatgaacttgagattcgggttgtaatcgatgccgaaaaactcgtggatcggcaccccgccgtctttggcgcgccggccgaactccaggccgaacaccgtcggcgccggcaccgagacgccgttcggcccgccggtgagcgacatccagttgttcagcaccagccgaatgatctcgccgaaccccagcgtaacgatcgccaggtagtcgccgtgcatgcgcagcaccggaaaacccagcagtgcgccggccagcgccgccatcagcgcccccagcggcagcatcgcccaaaaccccagcccgagatattggtagcccagcgccagcccgtaggcgccaatggcgtaaaacgccacgtaccccagatcgagcagccccgccagcccgaccacaatgttcagccccaggccgagcagcacgtagatcaggccgaggatcgccaccgtcagcaggtatttggtggcgacaaacgggaacagcagcgcgatcgccgccatcagcggcaggatccagcgcaggttggatttatagcccagcggccgcacgtaaacgccgtcgttgccgccgtcgaagcgcgccaacaccctgcgccccggcgcggtttgcaggaacaggctcagcagcagccgcccggccatcaccgcgacgatgatccataccagccggtgcggctcgaagttaaagctgtagccattcagcacgatgccgacgatcggcccgaacacgatcagggcgatcagcccggccaagacagcgtccagcaggctgcgtttgacgttcagcccgccgttgattacggattgcgacatggcgttctccttaaaccttggcgatcaggggccggccgagcaggccctgcggacggaagatcaggatcgccaccagcaacccgaaggagaacacgtccttgtaatccgaattcaccatgccggcaaactgcgcctccgccacaccgagcagcagcccgcccagcatcgcgcccggcagcgatccgatgccgcccagcaccgcggcggtgaaggccttgatgccaatgataaagccgacgtaaaaatcgaaggtgccgtagttcatggtgatcagcaccccggccaacccggccatggcggcgccgatcacgaacaccagcgagatcacccgatcggtattgatgccgagaatcgaagccattttgcgatcctgctgggtggcgcggcagatgcgccccagccgggtgcgctgaatgatgtaggtgaggatcgccatgccgagcagcgacgccaccagaatgaacactttggtgtaggtgatctgcaccacgccgccgtcgaactccaggcggaacacgccgctcagcagcgtcgggatgccctgctggcgcggcccctggcttatctgcgcgtagttttgcaggattaacgacatgccgatggcggagatcagcggcgccaggcgggtggagttgcgcagcggcttgtaggcaatgcgctcgattacccagccgtacaccccggtgatgacgatggtgaacaccagcgtgccgaggatcagcagcggaaacgagtgcagcccgaagaacgacagcagcgccaaaccgatggcgcacaggtaggcggagatcatatatacctcgccgtgggcgaagttaatcatgccgatgatgccgtaaaccatggtgtagccgatggcgatcaggccatacaccgcgccgagggtcaggccgttgatcagctgttgcagaaagaatacatccataatgagcagtctcgcctggtaaggccgccaacgcagtccgacgcggcccaaaggtcatcgcggaacgggcgcgccaaggcggcggcccgtcggtcatagggtcataacttcacggttaggccgtttacagttggtgatatttgcccttgtcatcccattgatagaccacgtagtccgagaccttcagatcgcccttctggtcccaggctttcttgcccatcacggtgtccacgtcgtgtgacttcagccattcggcggccttggcgctgtctttgccgccggtggcgttaaaggcggcggcgatcgcctggatcgaggcgtaggaatagagggtgtagccttccggctcaaagccgctggcgcggaacttggcgatcaccgccttgccctccgggatcaggcgcggatcgttgccgaaggtcatcagcacgccgttggtgtactgcggcccgccggcggcggtcaccagctcttcggtcaccacgcagtcgccggagaagaacttggcggtcacgccctgctcgcgcatctggcgcaccagcggcccggcttccggatggcagccgccgaagtagactacgtcaggcttgaccgaggcgatcttggtcaccagcgcgttgaagtctttctcaccgcgcgacagcccctcatacagcacttccttgaccccgcgcttgttcatcgccgccttcgctgcgtccgccagcccctggccgtaggtgtctttatcgtggatcaccgcgatgcgcttggccttcagcgtatccaacatgtagttggtggcgatcacgccctgctgatcgtcgcgcccgcacatgcggaacatggtcttcatgccgcgctcggtgatctgcggattggtggagccgggggtaatggcgataatgccggcctcgtcatacacctcggaagcgggcatggtggatgaggaacagaagtggccgaccaccgccgagaccttgtcctgatccaccagtcggttggcgaccgcgaccgcctgcttcggttcgcaggcgtcatccccctgcaccagcttgattttttcccctttgatgccgccggcggcgttgatgtccgccgccgcctgcgaagccccgcgccaatactgatcgccataggtggcgttcggcccggagaacggcccggcgacgccgatgacgatatcggcctgcgcggaaaaagccgtacctaaacaaccgatgagcaaagcagcgagcggactttttatcaatttcgatgacattgttatcttcctcagcactgttgtagcgaaacgccctggggcgcggatcagtcactttatgtgtagacggggaaaataattttcttgagagcgcagtcgcattccccaaaaatgggtaagcaaaaatccagccattgtgacgacgaatacatattgtttgcttattcatcctacatatcagttgcagcgcggcgtgtagcggggataaccgagagtatgggcagtgcggctagcatgagagggagaacggccctgcaccatcgccgtgcaaaggcttgtgcaatcgttgtgggccgcaaaatcaccgcacagcgatggaaaatgccgaaaaacagcgcaagatgttcattccgccagcaaacgcgctttttttgcagtttagcgctttgacaaaccccaggcaccccgctattattcgccccgttcacacgattcctctgtagttcagtcggtagaacggcggactgttaatccgtatgtcactggttcgagtccagtcagaggagccatatttagaaaagcccgcttaaggcaacttaagcgggctttttgcttttcgggttataactcgctgcaagagagggttcattcatccaggaatgacgaccggttacctggatcgctaaccggtgtttcaatagggtttacggtgcatgtcagcacatcatcaccgccccagggacaacatgacaatggcggttcagctcgggaaccagcctggggtattttgaatcgcttgccacagtttatgtgggatctgtaattcatccggatcttgcgacaaattgagtttgacgttcatgcttccttcatggcctgattgtactctctccacccattggggattcataaccatcgcgcgtcccaaagcgaccatggacaatccggcatccagcgcttgccgtgccacgtccgacgacgtgatttttccggcggccagtatcggtaaacggccgttattctgctcaatgaaccttgccagcgtacccttttcatcatcgtcatcccgaggggtgtccgtcagtacatggtgcagcgagatgtgcaaataatcgataagcgcctcttccgtcaattggttcgccaacgccagagaatcatctatacgcagtcccttttcgctggattcttccggagacaaccgataccccaataagaaaggctgcgtagcatggcgttcgataactcgccgaacttcgcgcgccacttccaatgggaaacgcatgcgattctctagcgaaccgccccattcatccgtgcgctgattgaaatacggggagaaaaagttttggagcaggaaaccatgcgcgccatgcaattccacgccatcgaaccccgcctcaatcgcgcggcgagtggcttcgccaaaatcgcggatcacagtcagaatttcatcatggcttaacgcgcggccggcttttttgccatcgttaaacgggcctgccggtgcggctagcgcactggcgctaacgagctcgccatcggggatcaaggccggaacggctttatttcccgcgtgaaagagttgcaggatcgccggcgcgccgccgcttttagcggcatccgccagccgtttcaggctcggaataaagcgatcgtcataggccgcgaactcatgagtaaacccgatgccatttcgctgtacatgggaacagcctgtcagcaccaacccaacaccggtcgcgcgtgcccgataataggctaactccgcatctgaaatagtttcatcatcattggctgaccaggtggtcattggggccatcacgatgcgattacgcatctcaagaccgtttttaaataaaaatggctgcattaatggatctttcataactctctcagcatttaacattttgatctaaaataaaaaatcataaaaaatcacttcgccagcggggttcccagccagcgatcatcgataaattgcagcatctgttccggtgtgatttgctgcgtcattcgccctcgcagcaccgtgcgatgctcgaaagttactgctccccgtgcaagcacctgggctttaaaacgcgcgatatgctcgtccgaaaagtggctgttgtgggtattaaacaggatgacccgtttaccgctgaaatcgctgttctcaataaaagcccaaatcggcggcgccggactgtatagccagatcggcgagcccaaccagagggtgtcaaacggcgtcaagtcaatcttggccggcgttatctcgggcaacgcatcctgccgctctttcagcaaagtggcgtctttcagcgcatacgccagccccggcaagccaggggcatagttcggcgcatcaagcctgaagagctgtgcatccaggcggtgagcgatatggcgagcggccagcgccgtattccctgaacgagaaaaataaacgacggcggtacgcgatgcgttttctcctgaatgcgcatgaggctctatcttggccaactgggcggcttgtcgattttcaatcagcgtgacagaggccaatacgcccaaaatggccagcaaaacgaccgtcaaaccgatgagggttccatacataggtaagcgccttgatgccattaatcaaaatcggtcgtcttgctgagcgcctcaaactcccacgtttcttcaatgcgggactgcaacgtcggcatgacgaaatcgatagcatcattaccgattaatagctggcgcggaggcgtgtccatttccaccaaccggcaaatcacctgcgcaagtttggcaggatcgccctgttgctgaccatcggcggatgccagtagctcgcgcgcgctgccaaaagcggcataatcggcaatgcttctttccccgtaccgggcagaactgtcattgagaaattcggtgcggaaaaagccgggctcaacggcggtgacggtaattccaagaggcgcgacctcatcagccaacgccagggtcataccttccacggcaaacttcgacgcggaataaaatgtggcgttcgcgacggcttttacgccggcgatggaagaggtgttgataatgcgcccgttccgctggcgccgcatcaccggcagcaccgcgcgcaatacattggccatgccgaaaacgttggttgaaaattgctgctctatctgttcggctgtcgcttcttcaaaacgccccaacagacagaacccggcattattcactaatacatcaatgcggccaaaacggctcacggccgcatctgcagcagccagcgcctgatgttcatcacgaacatcaagctccagcagctcaatcttttccgctgcaacatcgctgaatgtccggcgcaatttttccctatcccgccccgttgcgaccacacagtctccctgttgcaacgcagccctgacaatatgggcgcccatgccgcgcgcggcgccggtgacaaaccaaatgcgattcatatctgttcaccttaatcggtttaaaaactcgtactgcctcattgcagtacgaggtgtcgaggcactaaagcgtcaattgcaaactagggcgtatcacgatgtcatcgagtaatacgccgggcggttgagcaaatgaatagaccaatgcacgagccacatcatccggcatgagagcctgaatggcatcacgacgttcgcgcatcatgtccgcagaaacattgtgtccccattccgtatgcaccgcccccggatgaatcaatgacacgcgtatccctgcttcagccagctcctgccgcaagccgtcacagaaccccctgactgcaaatttggtggcgcaatacacggcccagttaggcgcgctgcttttccccccgacgctggataccgtggagatcattgcgccggggcgatttttcatcagagggatagcttcgtaggaacagttcaacacgccgtacatattcgcattgatctgctcctgccagccctcgggtgagctctcctcgaaccggccgaaaatccccatgcccgcgttgttgaaaagcagatccacaccgccgaagcggctcttcacctcattaaaaagtgaccggacctgagctaaatcagcaacgtcagcgtcaaaggcgacggcgcccccgcccagttcggcagccaggcttccgattcgctctttgcgtcttgctaccagcacgaccgaaacgccttccgcaaccaatcggcgggcggcagcttcaccaataccgcttgaagccccggtgataacagcgactttgccgctgagactgttcatctccatcgtcctgcctctatagaaaaattttatggcgggtgtttacataaaatacggcttgtcaccgtcagtgcccggctggttgacgccgatgttttcacccagatgttttttcggttgctcgatgatgtcggcaactaaagcggcgacgctcttgcgcgatacgatggttcctttgaacggcgcatcgcgggcggtaagctcatagtcaaccaggtcttcatccgttaaccaggccgggcgcagaatggtgtagtccagcccggaggcttcaatcgcgtcagccgcccgacgaaatggcttgaggggctcaccgatgatcgcgttgttccattcaccgaattttcccgggacctcatcataaatccccagcgaaagaacgaagatcaggcgtttgacgccgctggcctgcatggcggcaatcaccgcctcagcctgcacatccagatcctctcccgtcaggttggcatacaccagatcctggccctgcatcgcttgttccaatgcggacgggttcaacacatcgccgataaggatccggccgttggccgggcgcgaccggattttttccggctggcgagcgaacaacgtttgcacaagcgactgttcatccgccaatctgtcgataacatggcgggcgatttggccgccggcgccaaggatcaatacattcttcatggtgttctccatcggttattcacccaggtgcgcggccaaaaacggcagcaccttgtccatcgctgcgcgaacggcttccggtttgtcatacagctcgtaatgtgaaaagtccgctaacgagaccagctcgcgatgcgctgaagccgttgcgcgcccatagacttccatgccatcgcgataggcgccgaaggcaccgactttctcgcccaccaccaccatcaccggctgagtcagcagcacctcggtaaaggcgaaggcatcccaggccagcgttttttgcgcatgcgagaacaacatgcgcgtcgcgccacccggctgttgaccgcgcgcggtcttgtaatagtctgtcgcttcgaaaacgtcgcgttcggtgagcccatgggccgttgcctcttgaggactggcaggcagcagttcgttgacctgaagctctccgccccgcgcttcccgggtgcgctgcgcagccatcgcattcagcgcacccagcggatcgtagccgctgaagccttcgcggaagagtcgcccaatattaacgccggtgatgctcaccacggctttgatgcgtttctctgtcagcgtggcattgacggcataaccgccgccgccgcaaatgcccagcacgccgatacgctccgcatcgacatacggcaaggtgacggcatagtcgatgacgcggctgatgtcttccacccgctgggtcggatcttctatccagcgcggcgccccgcccgactccccctgaaaactggcgtcataggcgataacgacgtacccctgctccgccaacgccttaccgtaaacattgccggaggtttgttccttgcagctgccgaaaggatggacgctgaccaccgtcgggtagcgcttggattcatcgaaccccggcggcagctgaatgtgggcggcgatgtgccaggccatatcggcgttttggatgcgaacatttttcattacagcgtctcctcaaagaacggcgccaagacggaaacggcttcggcgacataggctttaccgtcatacaattccatatgattcgcgccttcgacgatgtggtaacgcttgtcgctgctcgcggcgcggtcgtataaatcgtcactcatccatttactgcccgccacgctgcccgccacgatctgcatcggctgggtcagatacacttcggccatatggtaggcgtcgtaggtaatgatctggttgaggctgcgcagcgtcgcatagccgggcgccgtcggatattgcgcgcgcggggtgtggtaatactcccaggcctggcgcagctcttcgttcggcgcatcggattctttcatcggcgccagcggcatggtggcatgttcaccgctgctgatatcgccggtgcgggcgttggagcccgcctcaacgtacggcagcgcatcaatggacttcacattgttttcccacccgttgcggaacatcgagccgatattgacggcgctgacggtgccgatggccttgatgcggcgatcctggatcgcggcgttggcggtatagcccgcaccggcgcaaatgcccatcgcgccaatgcgctcgttgtcgacataaggcagcgtggtcaggtaatcaatcaccgcgctgacgtcttcggtgcggatataagggttttccaactgacggggttcgccgccgctttccccctgataagaggcatcgtaagccacggtcacgaacccctgctccgccagttttgcggcataggtgccggcggtttgctctttcacgccgccccccgggtgagaaacgacgatggccggatactgacggcccgcgtcgaaggccggcgggaagtagagcactgcggaaagatcgatggttgggttattgctattcgtgaagctgattttctggttcatcatccggttcctcatcagggtggtcggttaactgcatcgtttctgattctcactatagacattgaacattaagatgattagacccaaaataatgattagacctatcacttaaatgattaattagccgaacggaaaacagagatgaaacgtgatgagatagccgatttggtggcatttgtggtggtcgccgaggagcgcagcttcacccgggccgcggcccgcctgggcatggcgcagtcggcgttaagccagatcgtccgccgcatcgaagaacggctggggtttcgtctgctgacgcgcaccacgcgcagcgtagtgcccaccgaggccggggagcagctcttgtcgaccctgggtcccatgctgcaagacctggattccgtcatgacttcactgggcgagctgcgcaaccgcccttccggcaccatacgcatcaccacggtggagcatgccgctaaaacccttttgctgcccgccatgcgcatgctgctgaaatctcacccagaaattaacgtgcagctcatcatcgattatggtcttagcgatgtggtcgcagaacgtttcgatgccggcgtccgtctggggggagagatggataaggatatgattgccgtgcggattgggcctgatattccgatggcgatcgttggcgcgccggattatcttgcccggcgaggcaccccgacctcggtggcgcaactggtcgatcatcaggcgattaacctctatcttcctacatcgggcaccgccaaccgttggcggctcatgcgcgggggacgtgaagttcgggttcgcatggaaggtcaactgttgttaaacaccatcgacctgatcctggacgccgctctcgacgggcacggcctggcctacctgccttgcgatcaggtgcagaacgcccttgacgagaaaaaactcgtccgcgtgctggacaagttcaccccggacttgccggggtatcatctttactacccacaccgcaagcacccaggatcggccttttctttgcttatcgatgtgcttaggtttaacgacgcgcagaagcccaaatagcgtgctgccgcctgcatccactccgacaggcacaggtatcgtctcctgtcagagaaactctggttgagaaaagcccgctcaggaagacctgagcgggctttgtgcttttctgccgttagcgcttacagcacaaattcgtagtgcgaaccgtccggcagttcgacatccaggcgcagtttgccgccggccgcctcaacatagcgtttaagcgaagacagtttcagatcgcggcccggtttttccatcacggcgacggtcggttgccggatacccagcacctgcgccatttcaacctgggttttctgcaccttctcgcgcagctcggcaagatggatgttcagcataatgtccgtcgccattgcctgcgcttcggccacgacctcgggcttttcctccgcaataagctgttccagcgttctgcccatcgcgtcactccttctcttttagtgtgttcagccaattcgtgaattcccgatcggcaatctgcagcattcgatcgtaaaaacgtttttcatcgcccgctttattgcccgcgcaaagcaccatgccgacgcggtacggatcgaaggcgaagaatgcccgcaacggttcgccacggctctgaatacgcagctctttcatgttgctgtaacgcgagcctttaaccgtatcggcatagggtctgggcaagccgggccctttttcccgcaggaccatcaatgcagcaagcacgcaggcccggtcggcatcgctgagtgatctgaaccaatgatcaaatgcatccgttgttttaatttcccacacgggccccctaaaatatagatcaatagctatatagatgtaaagctatagcagagaggcattgggatggcatgcaaaggcatgcgttgttactgcaaggctgaacgtacatccacgcattttgcaaacgcagtgcgcggcattcacctttttacgcgcggtatcgaataatcgttcagaggcacggggcgcttccccgccgcccctttatgaaccctgtcacaaaaagcgcataacgttttcggcgttctgcgcagcgggcgatgagcgacaaacttgttaacgccacgttacatcgggttaggcaacattgttaacgccgactgatgcgtcaaacgcatcgcgccatgcgtttattgcgcttatttactttattttcctgagcgagtcttcagcaacaggcgcggcgtcaagcgccaataacaaactggagataacgatgcattcctctacctcacccatgaccatccgggccagatccggcgcgatactgcgcgtcacctccggcaactttttagagcagttcgattttttcctgttcggcttttacgctacctacatcgcacacacctttttcccggccagcagcgagttcgcctcgctgatgatgaccttcgcggtattcggcgcgggctttttgatgcgcccgatcggcgccatcgtgctgggcgcttacatcgataaagtcggccgccgcaaagggctgatcgtcaccctgtcgatcatggccgcgggcaccttcctgatcgtattgatcccctcttaccagagtatcgggctttgggcgccgctgctggtgctgtgcgggcgtctgttgcaaggcttctcggcgggcgcggagctgggcggcgtgtccgtctatctggccgaaatcgccacgccgggccgtaaaggcttctacaccagctggcagtccggcagccagcaggtggcgatcatggtggcggcggccatgggcttcgcgctcaatgcggcgctggaagaaagcgccattcgcgaatggggctggcgcctgcctttcctgttcggctgcctgatcgttcccttcatattcttcctgcgccgcaagctggaagagacgcaggaatttaccgctcgccgtcaccacctggcgatgcgcgacgtgtttaaaaccctgctgaaaaactggccggtggtgatcgccggcatgctgatggtcgccatgaccaccaccgcgttttacctgatcaccgtctatgcaccgaccttcggcaaaaaggtgctgctgctcagcgcctccgacagcttgctggtcaccctgctggtggcgatctctaacttcatctggctgcccatcggcggcgcgctgtcggatcgtttcggccgcaaaccggtgctggtcgccatgacgttgctgacgttggccaccgcctacccggcgctgagcctgctcgccgccgcccccagcttcggcatgatgctggccgtgctgctgtggctgtccttcatttacggcctctacaacggcgccatgatcccggcgttgacggagatcatgccaacggaagtgcgggtggccgggttctcgctggcctacagcctggcgacggcggtgttcggcggctttacgccggtagtctccaccgcgttgatcgaatacaccggcgacaaggcttcaccgggctactggatgagcttcgccgcgctgtgcgccctgctggcgacgctgtatatgtatcgccgcatcgccatgccgctgcaaaccgcgcgctaagccgccatctcaaaaggaatgatgccatgcaaaaactcactcgttcgatcctcgccgcgctggtgtgcgcctcctgcagtacggcggcgctggccaaagacgtgaccgtcatgatctccggcggcttcaaagccgcactagagaagctggctccggaatatgaagctcaaagtggcgacaaaatcattctggtgtccggcccctcgatgggcaaaacgccgcaggcgatccccgcgcggctggcgcgcggagagcaagccgatgtgctgatcatggtgggcgacgcgctcacccaactggaaaaagagcgctggacccagccgggttcacgcgtggagctggccgattcgccgatcggcatggtggtgaaacagggtgcgcccaagccggtgataaaaacggatgccgagctgcgcaatgtcctgctgcaggctgactctttcgcctattccgacagcgccagcggccgctatgtcagcggccaactgttcaaaaagctgggcatcgaggaacaggtgaaaggaaaggcgcataaggttgagcgcattccggtggcctctgaagtggcgcaggggaaatacgcgctgggcttccagcaggtcagcgaattgctgcccgtggcgggcgtcacctttatcggcgagctgccggaaaacgtgcagtacatcacccgcttcgcgggcgcggtgaccgccaaggcagagcaccgccgcgaaggcaaagcgctgctgaacttcctcgcctcctctcaggcacagccgaccattcgcgcgaccggcatgcgaaccgtgacggcgcagcagccggtcaggcagagtgatactgttcagtaatcagcttttccagctcggcggcgacgaaagactgcatgcggccgccgcgtctgatgagacccacggtacgtttcaccactggatcgaccagcggcaccgacgtcaacaccgagtgctctgaagcgggcatcgacatggcgggcacggcggcaatgccgatgcccgcctcaaccatgcccagcatggtcgtcacatggcgagtttcacacacgctggggcgttccggcacgaggtgttccaggcgctgatcgagcagattgcgattgccggaggttttatccagcgagacgtaatcctgctgatagaactcttgccaggtgaggctctttttagcggcgagcggatggtcgcgccggcaggcggccacgtagacgtcccccaccaacggcacaaattcaagattaggctgcagccgcccggcgaagcagatgccgaaatcggcctggccgccggtgaccgcctcgatgacatgacctgcgctgccgtcgatcagcttgacgcgcacgcgcggatagcgcagccggaaacggcgtatcacgtcgggcatgaaatagtaggccgccgagggcaccgtggcgacggtaaccagccccacccgctcctggctgaccttgtcgatatcggccaacaccgcttcgacgttcatcagcagctgatccgaacgctcggcaaaagcctgcccgtacagcgtcaaggtcacgcgccgggtggtgcgatcgaacagtttgctgtccagcgcgttttccagcttctcaatcctgcggctcagcgccgactgcgacaggcagatggactctgcggccagccgaaaattgccgtactccaccagcgcgcgaaacgcatagagatcgttgagatcaaaattcacgggcataacgaccaactctccttgctgaaaatggcagaagacgcaaaacagcgatgataaccgcttatatcgccacgttcaccgactgggtggttgaaccacccaagcccctatcgccccagcagcaccattccccaaataatgatagtcatcaccacggctaccagctgcgctgcgccgcccaaatctttggcgcgtttggataacggatgcaattccagcgaaatgcgatcgactacggtttcaatcgccgtattaagcagctcaaccaccaatagcagaaaactgcaggtgattaataacagcctttctatatttgtaatatctaaaccaaatgtaacaaccagtaaaatggcgttaataaccaataattggcggaacgcatcttcggtaagcacagcatcaataaacccggcccaggaattcctaatgctgtaggttaatcggcttattccttttttcttttccacaggcatacaatcagctctcgtcaaaactgcgacagtcactcgcaaataaatcacgcagcgtgaatttatctcgagtttattaattaaaaaccttaaccgttctctttcaggaaacgatgcattcactcactcgccgtccccctgctcctgaaacgccaccgcccgaaaatgccctggcgcggttattattctgggagcgtcaaaaggggacgcgatatcagccgcttaaagcgttttctcgtacaagcggtaacgcttgtacggcaccgcgccgatgcgttctaaaatcgtccgcatgccggtattggtttccaggatccacgacatttccagcgcgtcgatattgcgcttcgcgaaaggctcgcgcagcgcctcaatcagcagcagcgcaataatgggcccgatgcggctgaattgatattcctggcgtacgcccatcaacggcacgcgcgcggtgcgcacgccgctgactttcaggcgccacaatagcttcgcccagccgaacggcaataaacgcccctgcagatcggcaatcgcttcgttaatgttcggcagaccgacgataaaggcacagggggcgccatccacctcggcgatatggatcatatcgtcgggcaccaggaacttcagctgatcccccatggtggcgaactcgtgctcggtgaacgggacaaacccccagttatgttgccacccggagttgaacacctcgcgcagcacctgcatctcctcgcgaaagcgcttgcgattgagacggcggacggtcacctttttacgcacctgttccatcatccgggttaacgacggcgaaaaatgcaggtcggttcttttcatccaataggcaagcaaatcaatcccttcgctgtagccctgctgcgctatctgggccgcgtagtaaggtttcgcgtgcgtcatcagggcggaaggcggggtatcgaacccttcgaccaacaggccgctttcctgattgatattgaggctgaatggcccggtgattttacgcgcgcctttcgacctcagccactcctccgctaccgtgaataaggtgctgaacacggcgggatcgtcaacggcgtcaatcatgccgaaatggccggtatcctcaccatgcagctcccggtgcagagaatcgatttgcgcagtgatgcgtccaaccactttgccctgttttttggccacccatgcctgccattcaatatggtcggtcccgggattcttctttgacaggtgctcttcgcgctctacatgcagcggctcaatccagttcggatcatcgcgaaacagttgcgaggggaaagcaataaattctttaagttcgcgtttatccagaactttctcaatacggatcataaatagccttacgttttaataaaataattaaataagcacgcgacaacgcctttagcattttttatgctgttgccttttattgaattgtgtattgcctccggctcactgataagaaaaaccgaatattccccccggcgaatcagcaacgtgttgcctgacattcaccctgtgatgtccataattgataaaaaaaggaaacagaaagcggcgcagccaggctacgctaatagtgctcttttattatttcgtgctgttatggtaaaagaaactcgccgcttttagtgtaccgactttaatcaggaggtgcgccgccatttttaccacttaatgctatttttaagattagccttaaatgaatcgttcacttttgaatttcttgcggcatactgtttaggaagtgtttaagttccaagatagccatgcatgaggtcataacctatgagccgacagttatttcctgcccgacagatgcagactaaagaacggcgaagcccggatattacaatagtctctcatatctcgccagggtgccgctcaaggctgatgactcgggctacttacgctctgcccggttaataaccggcatgccgctcgagcacggcaatatacgctgttcgcggaatgaagatggttgaataacaaacttattcaaaacctattcatagtaaaacatcaattacctcgccaagagtgatttctctcttttggtgatttttaatctatggctaagtttgtctatgtctgaaacaagttccgttcattctcttcccatgcgctatgcggacttccccacgttagtggacgcgttggattacgcggcactcggtaatacgggaatgaatttttacgaccgtcgcaatcaactcgtgaccgttctcgactatcgcacgctgcagcaaaaagcgatcgcgggcgcgcggcgtttattgtccctgaagctcaagaaaggcgatcgcgtggcgcttatcgccgaaaccagcccgggcttcgtcgaagcctttttcgcttgccaatatgccggcctggtggcggtgccgttggcgatcccgatgggcgttggccagcgcgactcctacaccgccaaactgaaagggctgatcgccagctgcaaccccgcggcgatcatcagcagcgaagagtggacaccgctcatcgcgtcggccacggaaaacacgtcggcgatgcacatcctcagcgacgcggactttaacgccttgccagagccggaaatcgcgttgccggcgccttcgcccgacgatatcgcctatctccaatacacctcgggcagcacccgctttccgcgcggcgtgatcattacccagcgggcggccatggcgaacctgaacgcgatcagtcgcgacgggatcaagttgcgcgccggcgaccgctgcgtttcgtggctgcccttctatcacgatatgggcttggtcggtttcctgcttacgccggtggcgacccagctgtccgtcgactacctgcgcacgcaagatttcgccatgcgcccgatgcagtggctgaaactgatcgccaagaatcgcggcacggtgtccgtcgccccgccgttcggctacgatctgtgtctgcgccgcagcaacgccaaagagctggccgatctggatctttccagctggcgggttgcgggcgtgggcgccgagccgatcccggccgagctgctcgcccagtttggcgaacacttcagcagcatcaacttcgacagtaaagccttcatgccgtgctatggcctggccgagaacaccctggcggtgagtttttccgacccttgctccggcccgcaaaccaacgaggtcgaccgcgatattttggaatacgagggtaaagcggtcgcgccgggcaagaagacccgcgccgtctcgaccttcgtcaactgcggccgtgcgctgcccggccaccgcatcgagatccgcagcgaaaccgggcaaccgctgccggaacgtcaggtcggccatatcacgatttccggccccagcctgatgaacggctatttctgcgacgatgagtcccagcagcagatccaggtgaccggctggatggacaccggcgatctcggctatctgctggacggctatctgtacgtcaccggccgcaagaaggatttgatcattattcgcggccgcaatatctggccgcaggatattgagtacgtcgcggaatccgaaccggaaatccgttccggcgatgcgattgccttcgtgaccgaagaacacgacgaagcggccaggatcattttgcagatccagtgtcgagtcagttcggaagaacgccgtgaacaaatcgtgcattcgctgagcgcgcgcattcaaagcgagttcggcatcgcggtggacatcgagctgctgccgccgcacagcattccccgcacgtcgtcgggcaaacccgcgcgcgcggaggccaagaaacgctggctgagcgcttcgctctacccgcaaatgccgcagctggccggtttcgcgcaatgagcggcaccgtggcagtgacgggcgcgaccggctttatcggccggcacatcgtccaggaactgctggcgcaagggtttagcgtgcgcgccctgacgcggcaagccggaaaagccgccgcagacaacctgcagtggatccccggcgcgctggaagatcggccctcgctcaccgaactggtgcgcggcgcggagtgcgtcgtgcattgtgcgggccaggtgcgcgggcatgcggaagcggtgttcacccgctgcaacgtcaccggcagcctgaatttgatgcaggcggccaaacagaacggccgctgcaatcgcttcttgttcatgtcgtcgctggcggcccgccatccggcgctgtcctggtacgcccattcaaaacaggccgccgagcagcaactcatcgccgccacgggcgatatcgcgctggggattttccgcccgacggcggtttacgggcccggcgataaagagctgaaaccgctgttcaacggcctgctgcgcggcgtgctgccccggctgggcgcgcctgacgccaggctctcttttctgcacgtgagcgatttggcaaaggcggtcagccaatgggtgcagaccgaacccgcgcagccaaatatttacgaactgtgcgacggcgtggccgaaggctataactggctgcgcctgcgggacatcggcgccgccgtgcgtcacgggccggtgcgtctggtgggcattccgctgccgctgctgaaagccctggcggatatcagcgtggtgtggaaccgcctggtaaaaaaagagccgatgctgacgcgcagcaaaatacgcgaattaacgcatcgcgactggtccgccagtaatcaggcgctgtcgcaacagattaattggtttccacaggtgagtttggaacgcgcgctgcgtgaagggctgttttaattattccaagtagaggtgtgtcaacgttcttatgctaaatcgcgatgctgtaatggattatatcctgacgtgtttgcaaggtatcgtcgaaggcggagtggaaataaaacctgatagcgatctcgtcaatgatcttggcctggaatccatcagagtcttggatctgctgatgatgctggaagatgaattagatatctccattcctatcaatatattgcttgatgtcagaacgcctgagcaactgcttgacgcgctgcgcccttatctggagaaaaaccatgggactgtatgataagtttgcgcggctcgccaatgaccgtgaacaatttcaaacgtccggtctgaatccgttcggcacctgtatcgacgaagtgtattccgccacccaggggcgcatcggcgatcaaaagattgtcctcgccggcaccaataattaccttggcctgacgttcgatgcgcaggcgatcgccgccggccaggcggctctggccgcgctcggcaccggcaccaccggctcgcgcatggcgaacggcagttacggatcgcacctgacgctggaacgggagctggcggaattcttcgatcgcccgagcgccatcgtgttctccaccggctataccgccaacctgggcgtcatcagcacgctggcgggaccgggtgccgtggtgctgatcgacgcggacagccacgcgagcatttacgacgcctgcgccctcggcggcgcggaaattattcgcttccgccacaatgacgccgccgatctggagcgccgcatggtgcgcctgggcgaacgcgcccgcgaggcgatcattatcgtggaaggcatctacagcatgctgggcgacgtcgccccgctggtggaaatcgtcgacatcaagcggcgattgggcgggtatctgctggtcgacgaagcgcactccttcggcgtgatgggcgagcacggccgcggcctggccgaagcgctgggcgtcgagcaagacgtggatatcatcctgggcaccttcagcaaaagcctggcttcgatcggcggcttcgccgtcggcggcaaggggatggacgtgctgcgctacagcagccggccgtatatctttaccgcttcgccgtcgccgtccagcatcgcttcggtgcgcacggcgctgcaaaaaatcgcccgccatcccgagctgcgggaaaaactgtggagcaatgcgcaccgcctgtaccacggcctcgccgagctgggctataccctggggccgcgcatcagcccggtggtgccggtgatgatcggttcaaaggaagaagggttgcgtttctggcgcgagctgatcgcccacggcgtctatgtgaacctggtgctgccaccggccgcgccggcgggcgtgaccctgctgcgctgcagcgtcaatgccgcgcacagcgatgaagaaatcgacaccatcgtgcgcgcctttgcggcgctgaaaaaataaagcctttccttctcggccgcggcggcggtgccgaaaatggccacgccgccctgccgaaccgatgcgcacctcagtgcgcagccgttgataccccatcagccgaatagcgatacccctgcgccgccataaattccgcgatggctttttccgccgccgaaagcacctcctcgatcggccgatcggcatcgagatccacgatgtcggcgccttcgaacgtcaatagcggcgtgacggcgatcttcttctccagcgccgctttgcggtgatcgggtttgcgcgcgcaggccacgtccagactgacattcagcttgagcaccagatccggtttttgccccgccatccattgaaacgccgcccgttcacgcgccgccagccaacggacgaaacggctgccttcaacgtcgacgggaaaaaccgtgccgtcgtaagcgccagggatctgcgcctgcggaaaacggtcggtcaacacgatgaacccttgccggcgatacgccagcatgcggcgaaaacgcagcagccgccgccccacgaaagcgatgatcaccgccgacggcaacaggccgatccgggattttttcgttttgacttttttggtattgctctcgatagccttgcccaccgagcgcccgagcagcggcaatttcgccgccgcgcgcccgacattgcccgcctgtttgcccagatgcacctgcaccgccgggccataatgtttcacatactcgatcagatgttcacaaacggtggatttacccgatccgtcgctgccgataaccgcaatcagcggcggaaattttgcactcataataagactctctttcaatacaccagaaacggcgtgccatatttgaagcgaacgatcgcttatcattgccgcggtggctgcgtgaaaaaaaatttgccatacgcagcgccaaaaagcacaaaagattaagcgaaaattgaaaacctctgctcttttttcgccgtgagccatgccgagaattaacataaaaagcgaaaccagcccacgcacgaacaattagcacaaaataacaagaacaaacgccatgaatatcaattcaaataacgaaaaggaataccgatctcattattttatcgcagcaaagcacaataaatatcttgaacccaaggcgtattggaatacaatagtttttttcgcattggatcaattattgtgagtcagcagataagaccttcatctgatcgctcgcccgtgcgcgtaatagcgataaccggctgtgacggctcgggaaaatccacgttagccgccagcctggtcaacgctttatcggcacaagaacctgccgaactgctgtatctcggccagtcttccgggcgtattggcgaatggatcagttcgctgccgattattggcgcgcccttcgggcgttatttgctgaagaaatcggaacgcgtgcatgagcgcccttccacaccgccggataatgccacggcgctggtgatatttttactctcctattggcgcgtttataaattccgtcgcatgctgaagaaaagccgcagcggcgcattactgatcaccgatcgttatccgcaagccgaagtggcggggtttcgtttcgatggcccgcagctggcgaaaaccgccggcggcaatcgctggatccgctggctgagaaagcgcgaacaaaacctgtaccaatggatggcgtcttatcagcccttattattaattcggctggatattgacgaacaaacggcctattcacgcaaacccgatcactcgctgacggcgttgcgtgaaaagatcgccgtcatcccgcacctgacgtttaacggcgctaacatattggatttagacggccgcgaaccggctgaccgtattttcgacgcatcgctgcgcgccgttaaaatatcgctgagggccgccaatgcctagccgacaaataacctttccgtaccgaaacagatgaaaaaaaataaactcaccgccgaacaggatacctctcccacctgcatcaccgggctgattgccgtggtgggcagcgacggtacgggcaagtccacgctgaccgccgacctggtgaaaaacctgcagcaacatcgccccacggagcggcgctatttggggctgatctccggcgaagacggcgacaaaatcaagaagttgccgttcatcggcgtgtggctggaacggcgcctggcggccaagtccgacaaaacccagcgcatgagcaacaggccgccggcgctgtgggcggcgctgatcatgtacggcttttcgctgtggcgcgcatccaacctgcgcaaggtgcggcggctggcgcagagcggcgttctggtgatcagcgatcgctacccgcaggcggaaatctcaggtttttactacgatgggcccggcatcggcgtggaacgcgcaaaagggtggctattaagccgcctggcggcgcgcgaacgccgtttatatcaacgcatggccgtcaatcggccggagctgatcattcgccttgatatcgacgtcgatacggccttttcccgcaagcccgatcacagttacgaagagctgaaagacaagatcgccgccatggtgcgcctgcaatacaacggttcacgcatcatcgagctggacgccagagccccttacgacgaggtgctgagcaatgcgctcaacgccatttccgccgtggtgaaccccgcgaagcgcccgcagagcgatctcgggcaacccggcgagaacgccggtaaagaaactcaggtttattaaacgaatacagggcaaacgcatgactgcggaacacaaaatgcagcaaaacaacgataacggctggtttgggctatgaaacggtggttttccgacggcgcgtttcgttccattttacgtaatgccgcctacctgggctccggcagcgtcgccagcgcgctgctcggcctgctggcgctctcctgcgccggtaaaggcatgtcgcctgaaatgttcggcgtgctggtggtgattcaggcctataccaaagcggtcagcgatttcatcaaattccagacctggcagtttgtggtgcaatttggcactccggcactggagcatcaaaataccgggcgcttccgcgacgtcgtcgccttctccttcggcctggatatcgccagcggcgtcatcgccgtgctgggtggcatgatcatgctgccgttcttgtctcacgctctggggctggacagcgaaagtttctggctcgccatgctgtactgcaccctgatcccatcgatgacctcgtccacgccgaccggcgtgctgcgcgccttcaaccgcttcgatttaatcgccatccagcaggcgatcaaaccgttcctgcaggcggtgggcagcgtcatctcctattatttcgatctggggttccccggctttatcgtcacctggtacgcctctaacctgatcggcggcacgctgttttggtggttcaccgcgcgcgagctgcgccgccgcgatatccatggcgcgctgaggccgcgcctgttcaacgtcgcgcgccgcatcgagggcgcctggaacttcgtctggaccaccaacatcgcccataccatctgggccgcccgcaactcctgcaccaccgtgctggtgggcgtggtgctcggcccggccgccgccgggctgttcaagatcgccatgaccttcttcgatgcgacgggcaccccggccaagctgctggagaaaagcttctatcccgagatcatgcgcctggatccgcgcaccaagaccccgtggctgctcggcctgcgctcttcgctgctggccggcggcatcggcctggccgttgcggtgttgatgttgctggtgggcaagccgcttatttccgcggtattcgggcagcaatacctggaagcctatgacctgattcaaatcatgctgggcgcgatcatcgtctccatgatgggcttcccgcaggaatccttactgtttatggcgggcaaacagcgcgccttcctgatcgcgcaggcgacggcctcggcggcctacattgcgctgctggtgtcgatggcgtatgccttcggcgtgcagggcgccgccttcgcttatttacttgggcaatgtttagacgttctgttatccctgataccgacgatcggcgcctaccgcaatcgctttatgttggggctgaatgtgcccaaagagagtaatcaatgaccgctagcaataattggaaaaagttctcagccgaaaccacccaggcgctgtttgtcgcggtggaagaggacgacctggttgaggcgaatatcagcctgccgcagcagattgatctggaatgctcccccgagagcattcgggacaactacgcgctgtgcctgcagttttgggaagacggcttttcccgccgcgagctgctgcaattggtgaacggtttcctgcaagacccgcagttggcggcggctacccgcatgcgctacaaatatatccgcgcccgctataagcacctgcgcttcgcccagcagctgtacggcgccccgcaccgcgccaaccgcctgttccacaccaccaccgtggtgctcggccattttcaggacgcgtttcgcaacggcaaccagaagaacctgacgctttacggcaacctgctgcggctgctgctcagcaagccggtgtggtcttacgtgcgctatgcgctgcgccacacccggctggaaagcgcacagggctttatcacctaccgccaggagcaaatgcgccagctgcaaacgctgatcgccggcccgtcgctgaccgggcatcagttccatgacgtgcgcaaaatcgtcagccgccaggtctcgttctacgacacgctgagatcgatcgatcccgacaaccgcgaggcccggcagatctcgcgcttcctggcggcgattaacggcctgatgggcgaccggcatgacgtgatggtggcggacaagctggccggcggcgatatctatgatcggccggcgatcctggatatcgacatccgccagcgcctggagctgctgctggcgcgttttccgctgtcgttttcccagccggccatcgcggcgggcagataagcgggttgcacggagccatgatgacgttacgtcgcttgctgacccttgcgctgctgctgtcgccgctgacggcatctgcacataacttcgtgcatggccggccggtggcgccgatcgccatcgccgatcgcggcgagctgctgctgcgcaacggcgatttcagctaccggccgtggaacagcgcaaaactggcgggcaaggtgcgggtgatccagtacatcgccgggcgcacctccgccaaaaagaagaactcgctgctgatcaacgccgttaaggacgcgaacctgccgggcgatcgcttccagccgaccaccatcgtcaacaccgacgacgcgataccgggctccggcttcttcgtgcgcggcaagatcgagaaaaacaagcggcattacccttgggcgcaattcatcgtcgacagcgacgggctggggcgcatggcctggcggctgccggaggagagctccaccatcgtagtgctggacaaggccgggcgcgtgcagtgggcgaaggacggcgcactcaccccgcaagaagttgaccaggtgatcgccctgctgcgcgcgctgatcgcgcaggagacgccatgaagcgcacgccgccgggaaccgataacgcatgtctttgattgaacgctatatcacggttgagatccgccgcctggtgatgatgatcgccgggtttctgatcttcatgttcgccagctactccgcccagcgctacctgaccgacgccgccaacggcacgctggcgctgcgggtggtggccgacgtggttttctataagtcgctgatcgcgctggagatgatattgcccgtcgcgctgtatgtctcggtggcggtcgcgctgagccagatgtacagcgatgcggagatcaccgccatgctggccgccggcgccagcccgctgcggctgtacaaggcggtgctgatactcgccgtgccgctggcgatagcggtcacgctgctgtcgctgtatggcaggccctgggcgtatgccaatatttatcagctgcagcaacagtcgcaatcggtgctggacgtgagccacctgcaggccgacaaattcaacgtcagcggcaacggccgcatgatcctcgccagtcacgtcgacaaaacggccaaccacctgacggacgccctgatttatgtgcgcggcggccatcacaccaacctgtaccgcgcgcagtcggtggaggtgctcgacgccccccccgccagccccgccgtgcggctgaaaaccggcaccgcctatgtgctggatcgtgagggcgccgacgacaacgggcagaactacgacaacttcgacatcgcgctcaaaccgttcgtgcccagcgccgagagccggcacaagtcggcctcgccggcggaactggcgcgctccgccgatccgggcgacgccgccgaactgcaatggcgcgagagccgcgggctgaccaccgtactgatggtgctgctggcgatcccctttagccgcatcaagccgcggcaggggcgctacgccgcgctgctgcccctcacggttctgtttaccgtgattttctatggcggcaacatttgccgcacgctggtggccaacggctctctgccgacgatccccggcgtttggctggtgccgatagcgatggctgtcggtatcgccctgctgctggcgcgcgacctctccctgctgcggaaaccctcccgatgaccctttttagccgctatctgatccgcaacgtgttcatcggcttcgccgccgcggccgggctgctcatcccgctgttcaccacctttacgctgatcaacgagctggaggacgtgaccccaggcggctaccgctggcagcaggcgctgctggtgaccgtgatgaccctgccgcgcagcttggtcgatctggggccgtttatcgcgctgctcggcggcatcgtcgggctggggcagctctccaaaagcctggagctgacggcgatccgttccgccgggatgtcgatattccgcatcgcgctggtgatgctcgccgccgggctgctgatgaacctctcgctcggcgccctcgatgaatgggccgcctcgccgctgcagcaacgcgcgctgcaaatgaagaataacgccctggcgcagtcgaataataacgacgttaccgttaacccgctgtgggcgcggcgcggcaacgagtttgtgacagtgaagaccgtcgatgagaacgaccagccccacggcattgagatcttccgttatcaagccaaccgcgcgctggagtcttacatttacgccgacagcgccagcaccgccgccgacggcagctggctgctgcacaacgtgatgcagaaaagctggcaaggcagaaaggagacgattgcgcgacaagacagcctgctctggcgctcactgttcgccgtgccgagcctgaaagagctgaccctgccggcgggcagtttctcgctccaacagctggatcgctatatcgattacctgcaaggctcggggcaacccagcaccgaataccgcctggcgctgtggaaaaaactcggccagcccctgctggtgctggcgatgattttgctggccatcccgtttaccttcaccgccccgcgcgcccccggcatgggcagccggctagcgcttggcgtcatcatcgggctgctgacctacatcgcttaccagatcgttctcaacctggggttgctgttcgccctcaacgcgcccttcaccgccctcgccccgccgcttttgctcctggcgttggcgctggtgctggtttatcggtttgaccggcggggttaagcattttctgaggttgataagggataagaagagaatcgcaatttccattccagagaaaacatcacgcactcacctgctcgcgatttttaaggatgttagttaatggcaaagatagctgtttgtatactgacttttaactcctctcgtttattacacgaggtgctttctccactcatgggcattgcggatgagtggattgtggtggactccggcagtacggataaaacgctgtctatttgccaaagctttggaatcagccctatttatcatcgtttcgagactcacggacggcaaatgaactttgcgatttctcaagctcatcatgactgggtgttgtgcctggacagcgacgaaatccttgatgccgaaaccatagcatccattttaaaattcaaagcgcaggaaaacccaccgccacagcaagcctttagaattaaaaggaattggtttgttctcggacagccagtcagaacgatttatcccatctcctcaccggactaccccgttcggctgttcaatagaacgcaggtcaggttcaatgatgctccggtagatgatgccgctgaaggctatattcacacgtcggtcattcccggcaatgttaagcacgataccttttactctctccatgaaatattcaacaagctcaatagctatacgacaagggtagtaaaatacagaaacattaggccctcgatatttcgtggcatcgttagcgcgatcggcgcattttttaaatggtacatactgagcggggcatggaaggaaggcaaagtcggcgccgtcactgggttttatgccgtggcctacagtttcctgaagtattttaaatcctggtatggcaaagattgataatgttaaggacagaaacaggggcgtttccccgccgctactgatcctggcgttggtttatcgatttgagcggcgaagttaacaccctacagcagcctttagaaaacaagaactttccggttaatagttgaccggctttacaaattggcctgagccgttattatcccttatttggtgtcctaagcgccgttagctatcgctggctgccgttcgataacatgcccctcagggggccatcgagtgcaaggagtgcgagcgcccgcctgaacaggccaagacgcagcaagcaaaggaagagacacactatgttttccagtttgaaactgctgtatatcgccgatgatattatttcacctgatgattgaagatcagaaagacgaggatgtctccactatcagggggagaatatgagcaagttgataatggcaatggcgttactgtttactgttctcatgatgcaaggatgcaaaaaaaacatggaatatgaaccacaggatttttttgaaggccagcaactggacatcgcacagctgatttatgatggcgatgaagtgaaactgaaagagaaacttccctctgtcagcaaggaagaactgaatcgaccggttaaggcagacatgaccctgctgttttggtcggtgctaaactcaatctatgataaaaacacgccagaaaggctgaaaataataaccaacttggtaaaagctggcgcagacccgctgcaacccagaccagaaggaggaagcagcccagcggaattcgtcatgaaagccgacaaggggatttgggtcaaagccatgctcgacggcggtttaccgccaaacgcaaaagataaggtattcaatgagcccattgtattccaaacaatcaaagccaagaacacagaaacgttaaaggtgatgctggattacggagcggatataaatatcagagactccttacaacaaaccttattaatggatgctttttttagctcagcctttgagcacatgaccctactgctcaatcggggtgcgaatcctaacccggtaaatataaacaatctttcgctgttaacagcagtgaatcggcaaatcaaagacagccaagatggctcagaatacaatgaacagtgtaagaaaatactcgagctcatgcttttaaaaggagcaaaggaaacgcagtaatttcactaactcggatctgacagctgccggttatttatactgaagctgtcaggttacatctggctttcgataaacacgctatagaccaaaaaactgattgaagagacgaggatgccaccattctcagggggagagtatgagcaaattgataatggcaatagcgctactgtttactgtcctcatggtgcaaggatgcaacaaaagcatggaatatgagccacaggatttttttgaaggccggcagctggaagtcgcacagctaatttatgatggcgatgaagtgaaactgaaagaaaagcttccttcaataagtaagcaagaactgaatcgaccggttaaggcggacatgaccctgctgttttggtcggtgctaaactcaatttatgataaaaacacgccagaaaggctgaaaataataaccgacttggtaaaagttggcgcagacccgctgcaacccagaccagaaggaggaagcagcccagcggaattcgtcatgaaagccgacaaggggatttgggtcaaagccatgctcgacggcggtttaccgccaaacgcaaaagataaggtattcaatgagcccattgtattccaaacaatcaaagccaagaacactgaaacgttaaaggtgatgctggattatggtgcggatataaatacaatggattcattggggaataccttgttaataaactccctagactatcgctcgtttgatcatacgattcttttattggagagaggtgcagataataaaatcaagggtaagtttggttggactatgggcaatcagcttcagcgctttatagatagaggtgtaggcgacaccgaggataaagaaaaaatcaacaagataaaagaattgttaattaaaaacggtggagactggcctcctctacctatagagaattgagactcccttaaggtcagcgtcgaagacatgtaatatgccgctcaggggcgaaatggcaaccgcccctgctcgctctgtcgatagttgccggggttaacgcaattccttcgctatcgcgctaaacatcagcgacgcctccagcggttgcgcgctgaaagaaggctccgcctgaggccaggtggaccactggacgatcaccagattctccgcctgattgaccatgagcatctggccgaagatccccagcgcccacagggaatgcttgagggaggcctgcggagcgggttctacgttaatcgcattcaccggcacttcgttgttccaccactggtagccgtaaatgccgtcggggtgcgccgccgacacagaacccgccgcccgcgtccagttggccgactgggctacccaatcttccggcaagatctgtttgccgttcggcagcgtcccgttatgcagaatgaattcgccgaagcgcccccagtcttccagcgtggcgttaaagccgtgcgcacccacgtcgtgctggcctttggcgtaggcatgccacacgccgtcgctcgccatgccgtacggctgccagatgctttgttccagataggtcgccagcggcatgccggtggcgcgttccaacacgtcgcccagcaaccaagcgccgccggaggagtaagaccagttctgcccagccggatgcgcacgctgcaggccggctaccagcttgcgcacgcaggcgtaggtgccaggcctggcttcacactcggtcagctgcgcgaagtccgatttcgggttggtgtaatcctcattccacgccacgccggaggtgtgggtgatcagctgcctgagggtcacgccgtcccacgcggtgcctttcagatcgggttcgtattgcgtgatgagatcgtcgagcgagcggatcttgccctgtttaatcgctacgcccaccagcgtggcgaccacggatttgcccaccgagcgcgacgtccacagcgtggcgtcggtattaccctgccccagatatttccaggcgattttgccgtctttcaataccagcatgccgctgacgttctggcgctgcagataatcctgcaggtggtaggttttgccattcactcgatagctggcgtccgttagcggtttagcggcagccagcagcggcgcagcgttaccgtggtggaacacatccccggcatagttgcggtagtcattacgaaaaccgatcacccggtcgctctggctccaggtgagcatcttgtgcgtgtccggcaattgcgcatcgaaaggcgcgggacaggcgctgagttcggtgcccgcacaggcggccagcgcggcgggcgccaacaggccgctgcagagactgatgacaacgcccgccagcaggctgcggttaaacactttgcttttcatattttttctcgcttagctcaggaaggtgttcagcttaaaaaaacgcggcctataataaaaaacgcctgatgggggaaaatcccccgaaaaatcgacgggagaaccgcgtgccgagcctgatttattcctttgcccaactggaagccttcaccgccgtggccgagcacggcagcctggcgaaagccgcgctcaagctgggcaaagaccgcacgacgctgcgcgatttgattgattttctcgaggatggcttgggctatgcgctgttcctgcgcgaggggcgcagcctgcacctgacgccggaaggcgaacagctgcagcaccaggcgcacctgctgatgcgccaggtgaaagcctttgaggcgttcgccaaagacgtgccgaagagcgcagcgcaggaaatctcgctggtctacgatcccttcacgccccgcgcattgctgcaagcgctgattgccgccatggcccagcgcaatacgcgcctgagcctgattaacgcctcgcgcgacgaagcggaaagcctgctggcaagcagccaggccgatctgggcatctgccaggcgcgcaaccgcagcgtaggcgacaccatggagtggcgcgccttaggggcgatagagatggatttttacgcctccgaagcgcttttccccggcgcggaacagccgctttcgctgctggagctctcgctcacgccgcaggtgatcatgcacccggattctgacgaaccggtggcgcgccgcctgcaaatttcagggcacaccatcttcaccaacgaattggagatgctgcgcgccctgctcgaacagggctgcggctggggattcctgccgacacacatgcatgccgaacagtggaaaaacgttaacacgctgcgtaccgaagtgggcagccaggggatcagccaaaccatggtcaccatctggaagccgggcaatgaccgacgggcgctgattgatgagacgttggggttgttgccgggattgtggcggggagctgaggggtgaaaagtcgctgttagattagcggtgtttttactggtaatcgagagtagagctcatcagctgcgttgtttatccgaacgttcttaagcggggattgttgttttccccagcgagtccctcaccgccgtcgctccagcgctgctggcgctggtttattgctttgaatggtggcatttgagggggggctttgagcgaggagcagacgtctacatggaataacctacttaagggctcttcatgcaggtccgctcgagtaataagttaaagattagaggcaagggctgcattgatacattttagtacatcatcatcttttccaatagatacggggaaacctctaacattaagaatgttactctcgattgagataacaagtttttcaccttctatagccaaaccaaatattttagaacgctcacccaaaattgaacgagccaagatattgaagtttgttgatgattcaccactctttaatctggcatgagctggtgcaacaattgaaagcaaaagatctctcagtgcatcagcttcacatattacttcagtgctcgaggcatgctggacgcagcggatcaaatctgaatatgcggtgttaacatcgtcaagcgataactgattgatatggtcaatttcaccaacagccgcacttggctttccaattgaagtaaatggatctgaattttgatagtaagactctactgaacctttgcgtaaaataaataggccacactgttccagcaggtcaagtagcacttttaaacggatctttatactactccactcattgtccttagctaaattttccaattcattatcatcaataatgaaaagtgtacagaaagcagagcggcgctttgcttgtgccacttcctcggttttcttgttcacccaatacgggtgcaattcggcgattgcagaaatttcattccaccggcaatctaccaatttgcaaaaatctgtgaatatagcactaaccatttgttgcgaggatcgataccctaactcactggctcgcgtttctgcggtgggattatcattaaggtatgaattgacaagatcaagaccatcagcgattccatcagcgtccgccaacgcaactgggcttttgccgagtaaacgcaataattttgccacggttggcatctgtcctttaccaatcacaggtaataactgtgatccggcagcttcaagatgtatatcaagtttgtttgcaagcgcactgcaaatcattacatcagaggggccttcaactaataaaggccgtttggaaaacaatgataacttatgctcttgtccgagacgagcaattaagttttgtacttttttgttcctgagctcgccagcgtcagctggaatttgcactggctcactaatcaggtcataacagaagacaagagatagtaaatcttccggtttctgaatttggagcatttctgttgaatgagtagcgatgataacaatctttttattacctccctcagacgggtggcccgagacactgaggatttcatgaagaagaaatgcctgtaactgaggatgcaaggaaacctctggttcatctagaagaagcgcccctacatcatcatcataaagtgcagataaaatcccaaccagatgcatcaatccggatgcctctctgcctgacgagtatgattttgcttctatgtccaatcgcgaaaataatatttttagtgatccaccatcccattcaataagaatgtcgcgcttgaataacttccgaagtctctcctgaattttaattaaaatatcagcccgttcagcaagcgtttggaaatcgccattaatagtttccatctgatgtctgcgaacagtatcactcttgctaccataagttgcgtagtcgtactgtggtgagcctccacgatgcccgtcaaagtctgatctatactgctccaacatccccattcgtccagcagagagaaagcgcacatactttccattcgtatgctgactaagactttgcttgagccccctcaaaagatgtgtttttccagagccatttgggccgagtagaactgtaagacctctgtttaaggtgaccttgcgattgaaattttcattgtgaccagcaatttgcgctgtcaattctagagggaaactcacttgcatcactccttatgcatgacatgttcagcaaaagggtttccatgctttaattatggggtatcccttatgccctaaactttaataataaacggaagtaactaaaatttaaaagctgacaaaaagaatactgttcgtcagaactaaaatatacatctataactcgaataattcagcatgataattgctcaaattcacattaaattttggtggggtcgctttgcaaaggaagtccgcatttggcacaaagcagccattaatacctaacttataaccataaaacacaccttaccaaactctccttcaacataatatagccacataaaatgattcaactcataactaataaaccaacgacattattacctctattttcattccattattctccctcccctcgctctccccccaactcccccctagcaccgcccccgccctttccctacaataagggatctgttgaggcataacgcaaggaaagacggtgtcgaaagccaatcccaatgccactatcgtggatatcgcccgccgcgccagggtgaccaatatcaccgtttcccgcgcgttcaataagcccgagctggtcaagccggaaacccgcgagcgcattcacgccatcgccaaagagctgaactatgtgcccaacgcgttcgcacaggggctgaaaagcagcagcagccagattatcggcatcgtcaccagcagcatgtacaacccgttctattccggcctgatcaagaccgtgtcgcgcattgcgcgccagcagggctaccagatcatgctgttcgacaccgacggcagcgaagaggcggaaatgcgcgccattcaggcgctgttcggctacaaggcgcgcggcatcctgctctcggcagtgcgcgacgacaagcgctaccgccccgcctatctcgagctggccgaggtgtacggcgtgccgctgatcctgatcgaccgcgatctttacgatcagcagctgagcggcgtgttcctcgataaccgcgagatcggcgtgctggccgggcgttatctggcggagcagccggagcagaagcttttgattatcggcggcccggcggattcggaaattacgctaacgcgcaccgccggcatcgtcgcggccttgcagggcagcggccgtgagattcacatcatcaacggcgactacgatttcacctcacaggaaagcgaggtgcgtgcctatctggcgcagccggagaaccgcccggattacatcatcggcctgaatggcatcatcacgctgggcgccatcgccatctgccacgagatggggctctatcagcaggtgaaattcttctcgatagacgagccgccgcgcgccggcgcttacggcctgcacattccgggggtgtatcacgatacgcaaaaattgggggagatcgccgcggagctgctgttcagcgccattaacagcccgcgcggcgagctgccggtgcgcagagagttcttcaccggctcgctgttgaatcgctgacgggcgctattgcccgtagtaggcgtgtttgccgtgcttgcgcaggaaatgtttgtccaatagctccggctgcatcggggcgatggccggcgccagctggcgcgtcgccatcgccatgatcgccacctcttccagcaccaccgcgttgtgcaccgcatccgccgcgtccttgccccaggcgaacgggccgtgggagtaaaccagcactcccggcacctgctgcggatcgcgccccgcctgattgaaggtctcgataatcaccttgccggtttctccctcgtaatccccggcgatctccgcctcgctcatcggccgggtgcagggaatgtcgccgtaaaagtagtcggcgtgggtggtgcccagcgccgggatcggctgcccggcctgcgcccaaatggtggcgttgcggctgtgggtgtgcaccacgccgccgatatcggcgaaggcgcggtacagcgccaggtgggtggcggtgtcggatgagggtttgcggcgcccttcgcgcacctggccctccagatccaccaccaccagatcctccagcgtcatcgcctcgtaggcgatgcccgaaggcttgatcaccaccagcccgctctggcggtcgatcgccgagacgttgccccaggtaaaggtcaccagcccgtatgccggcaggctgaggttggcggccagcacctgccgcttgagttcgttcagcatgcgatgcctccatcattcatctgttgttcgagccaggccttggcctgggcgatacgttgcttgtcctgcccgtcttcgcgcgcccacatctccagcaggtaggggccgcgatagccgagcgcgttgagcacggaaaaggcatgggcgaaatccacgcagccttcgccgaacggcacgtcgcggaactgcccggcgctgcccggccccaccgccacggtgtctttgaggtgcacggcggtgatgctgccgatgcccagcgtcagctcggcggcgacgtcgttgccccaggcgctaaggttgccgagatcgggatacaccgtgaaccacgggctgttgacgtggcgggcgatgtcgcgccatttgctgatgctgttgatgaacggcgtatccatcacctccaccgacagcatcacctgcgccctggcagcctgcgccgccgcccactgcatgccctcgataaagcgctcgcggctgtggcgatcggccggttcgtaatagacgtcgtaacccgccagctggatgttgcggatgccgagatccgtcgccagttccagcgccttgctcatcaacacccgcgcccgctcgcgggtggcggcgtcggcgctgccgaacggatcgcgccggtgcgccgacaggcacaggctcggcaccgtcaccccgctgtcgagccgcgcctggataaacgccagccgctggcggcgatcccagtccagccgctgctggcgtgccggctgttcgtcgatcgacatctccacgaactcaaagcccagctcggcggcggtggccagccgctgcggccagcccagatcggcgggcagcgccttttcatacagccccagacaggcggcgttagtcgtttgcatcagtcacctcactcaaagcctgagcgaccgccagatagcgcgcctgctgggcgcgcaggcgccgatgggcggcggtcgcgggataataacagcgcagtttgggcggcgcggcggcgatcgcttcggcgaacccggcgtactccccggcgccgacggcggcgcacagggcggcggcgcggcagccgctctggcgcgtttccaccacctcaagcggcaggttgccggcgtcggcgtacatctgcatccacacctcagactgcgtcggcccgccggtcatgcgcacccgctcgatgcgcgggttcagctgcaccatgcgctcctgatggatcaggtgcgagaacacgatgccctggtagatcgcctgcaccacgtccgccatctcgtggtgggcgctcaggccgatcagcccgcccggcgtgttgccgccgaggttggagccgtacagatacggcaggaacagcagcccgctgggctgctcgcggcgctcggccacccaggcgttgaactgggcgtagcgctgccggtcgtcggcgcagaactggcgcaggaaccaggccaggttgccggccgaggtcgggctgccttcgtgcacgaaatagcggccgtcgatacaatagcgcccccaggcgtaggggtaatcggcgggaatgatgcgctcggtcacgcaggtggcgatcgaccaggtgcccgccaccgcgctgagcgtgcgatcgtcggccacgccggagctgagcgccgcgcccaccacgtcgaacaggccgccgtacaccgcagttcctacccgtagaccacattgcgccgccgccgcggccgtcacccgcccggccagctgcgccgaaccgatcgttggcgcggttttctcctgcgcctcttcgatgccgaaggccgccatcagcgccggatcgtaagcgccgctgcgctggttaaacaggttgctgccggagatgttggtcacttcggccgccgcctcgccggtgaggcgaaagcgcaggtagtcgtgcgccatcaggatgcgatcgacggcggcgtactgcgccggttgccgctgcttcagccagcgcagcagcagcgccgggtggctgggccacagcggctgcaggctgcgcgggtaggtctgcgcgtccacgccggcgcggcgcagctcagccgccgtttccgccgcgcggttgtccgaagagaggatgccgttgccgaccggtttgccgtggcggtcgatggcgtacagccctttgccgtgcgccgaaaagctgacgccgcgcacctgcccggccgacagccccgccgcgtgcagcgtctggcggatcgccgcgcacacgtcatcccacagcgcgtccatattgcgttcgctaaagcccggctgggcagcaatcgccgcgccgtcgcgctcggcgatcgccagctcttcgccgcttgcccggtacagcccggccttgatcaccgtgccgccgacgtctatgccaagaaagactgacatcgcgcctcctatttgcgccgcacggagctgaggtagatggcggccagaatgatgccgcccttcaccacgttctggatatacggcgacacgttcatcagattgaggccgttgttgagcaccccgagcatcatcgcccccaccagcgtgccgacgatggcgccgcgcccgccggagatcgccgccccgcccagcactacggcggcgatggcgtccagctcgaagccttcgccggcgttgggctgcccgctcatcaggcgcgaggtcagcaccagcccggccagcgcggcggtcaggccgctgatcacgtacaccagcatcttgtagcgcggcacgcggatgccgctcaggcgcgccgcctcttcgttgccgcccattgcatagacgtagcggccgaacggcagctggttgagcatcagccaggccagcaggtacacgccgagcatgatcaggatcggtacctgaatgcccagcaccgtgccgcggccgaagaacgagaagacgtcgggcaggccggagatcgggtagccgccggtatagagcagcgccaggccgcgggcgatgcccatcgacgccagggtgacgatgatcggcggcatgcgcaggtaggcgatgcaggcgccgttggccaggccgaacagcgcgccgagcgccagcgcggccaccatcgccagcgggatcggcaccgccgccagcatcagcccggcggcgaccgagccggccagcgccatcaccggccccaccgagagatcgatgccgccggtcaggatggcgcaggtcatgcccaccgcgatgatggcattgatcgacacctggcgtgccacgttggtcaggttgttgacgctgaggaagctgtcgttcagcaggctcatcagcacgaacaggacagcgaagccgataaacggcaggaccgccgggtgatgcagcagtttttcccagcgcttgccgaggctggggccggcggcgcggcgcgccacggcgggttgttcaattcctatcataaggcactcccggtcgcgtgaagcatgatgtggttggattcgatgtcgtcgccggtcagctcggcgacgatgtggccgccgcgaaacaccagcacgcggtcgcacacgccgatgatctccggcagttcggaggaaatcatgatgatggagatgccctgctgggtcagttgctgcatcagctggtagatctcggccttggcgcccacgtcgatgccgcgcgtcggctcgtcgaagatcaggatgttgcagtcgttgttgagccagcgggcgatcaccactttctgctggttgccgccgctcagggtgctgacggcggtctcggcgtccggggttttcacccccacggcgcggatcagccgctgcaccacgtcgcgatccttgcgggcgctgacgaagatcttgccgcgccggtggtgccggttgagggtgatgttctgcgccaccgagaacggcagcaccaggccctcggttttgcggctctccggcagcaggccgatgccctgcgccagcgcctgcgccggggagcgcagcgccgccggttggccgccgaggctgacgcgtttgcggtggcagcggctggcgccgatcagcgccgagacggtctcggtgcgcccggagcccaccagcccggcgaagccgaggatctcgcccttgtgcagccgaaaacggtcggtcgcgccgtgcttctcgcgctggatctccgcctccagcagcaccgtctcggtatcaaccggatgctgtttcaccgggaaggcgttctcgattttgcgcccgaccatcagccgcaccagctcttccacgttagtgtcgccggtggccagcgtttcgatgtaggcgccgtcgcgcagcacggtgatgcgatcgcagatggtgaagatctcgtccaaatggtgcgagataaacaccatgccaacgcccagcagccgcagatcgttcatcacgctgaacaggtgttcggcctcgcccggcgtcagcgtggcggtcggttcgtccagcaccagcacccgcgcctccagcgacagcgccttggcgatctccacaaactgctgctgcgccacgctcagctgctccaccgggcaatcgagatcgatagccaccgtcagccgcttgaagatcgcctcggccttgcgccgcatcgcccgccgatccagcaggccccagcggttcctgatctcccggttgaggaagatgttgtcgatggcgctcatgtagggaatcaacgagaattcctgaaaaataatgccgaccccggcctcgatcgcctggcgatagttgttaaagcggcgctgctcgccgtcgataaaaatgtcgccctcgtccggctgatggatgccgcacatgattttcaccagcgtcgatttgccggcgccgttttcgcccagcagggcgtgcacctctccccgttgaatggccagatcgatgccgtccagcgccttcacgccgggaaagctcttttttattcgcttcagttccagtaaaggtgtcaccgcattgccctccgcgccgaacgccccgccgcagcggggcgaacctgccgctgttaccagctaaagccggccgcattgctgcggtcgatcagcttcactttgaccggcacggttttcggcaccgtggcgccccagtagcgggccagcgcaatgccgagcgcgatgcgcagctggtcgcgcgggaactgcgccgaggtagcgatgaacggcgaattcggcttgaggatctctttgatggcttccggctggccgtcgacgctcaccagcttgaccttggcgccgttgctttcgatcgccgccagggcaccgagcgcgccgacgtcgttgacgctgaagatgcccgccaaatccggtgccgactgcagcatgttttcggtgacggtcagcgcggtgtcgcgctcctgcttgccgttttgtttggtgacgatcttgatgtcggggtattttttcatcgccgcttcaaagccgcgcacgcgctccaggatcggcaccaccgggatgccgtcgaggatcgccaccttgcctttgccgcccagcgctttcgccaggtattcgcccgcctggaagccggcgtcgtagttttccgagccgacgaacgagtccagcggcccttcggcctgcgcgtcgatcgccaccaccaccgcgccggccttatgggcggagatcaccgccgactgcacccccaccgagtcggtcgggttgatcagcaggatatccaccttcttctgcagcatgtcttccacgtcgccgatctgcttggcgacgtcatggcgggcatcggccacatacaccttggcgccgatatccgccgccgcctgatccagcgcctgcttcatggtgacgaagtagtcgttgttcatttcctggaacgacataccgatagtgatttgcttggccagcgccccatggctggccgccaacattccaccggcgacgataaaaggcagggtctttttgaataatgaaaacatagccaattctcctgtagggaagcttcttgttgtggttatcagagcaacagcatgtctttacgtttggccgaccggccggcccccccattgcggagcgggccggcgatcgtgactgcaacagcggtacagcgggagggtcagggaaccaggatcaccttgatggagtcggtcgagtccgccagggcgaaggcttcgtcccagtcgttcaatgaatagctgtgggtcaccacgccgcttgaggtcaccagcccgcgctcgaacagatcgatggcgatctcatagctgtagggcgccaggtgcgcgccgcgaatgtccagctccttgcgatcgccgatgatcgaccagtcgacggtggtttccttgccgaacacgctgaactccacgaagcggcccagcttgcggatcatctgcagcccctgagtgacgccgatcggcgcgccggtggcctcgatgtagacgtcgcagccgtagccgccggtcagcgatttgacgatctggtcggcgtcttccttcagcgggttgatcaccacgtcggcgccaaactccttcgccagcgccagccgctcgtcgatggcgtcgatcacgatcagtttcttcggcgttttcaggcgcgccacctgcaccatgcacagccccagcggcccggcgccggccagcaccaccacgtcgtccagctgaatgtcgccgcgcgccacggtgtgaatggcgcaggccatcggctcgatcaataccgcgtcttcatggctcaggctttccgggatcttgtgcacgatggcgttctcggaaaagcgcatgtattccgccatgccgccctccgccacgtctttctggaagccgtaaatgttatgcgtctcacacatccagtaactgccggatttgcagtaacggcactcccagcacggcacgatctgctcggcaatcacccgctcgccgatccggtatttgccttccgcgccctcgcccagcgcggcgatgcggccgtagaactcgtgccccggcaccaccggcggtttgacccacgggttctctccccaaaacatctgcgcgccgttcttgcacttgcagtcgccggcgcagatgccgcatccttccaccttgatcaccagctcgcgcgccttcggcagcggcgtgggcacctgttcgaaacggtagtcctgcgggccgtggcaaacgaccgcgcgcattttttccggcagctgactcatccactcctccaatacactcgttaaacacttgaaaaacctaaatgttgacgttgtcatttttatctaataaaaaacaaccaacgttataaagtgataaatttcaattgattaatcatcaaacacccaggaaaactcaaaatgacaacgtgaacatagagcgacatataaccaaagctgcaaaaataattatttgagcaaaatcacagttcgttaacattgcagctaaaaatgctacaaatgcggatcgcgatcccatttacgggatcgccgatccgggcagatccgctaaatcagcaggcgcacgcgatcgtagatctggcgatcctccggccgcgacgatcgcgcctgctggcgcagggtacgcaccagcgtgtcgataaacgcatgggcggcggcgctcagaatgctgttgcgccgggtgacgatattcaactgcgctggttggcagctctcgcgcagcgccagcggctgcaagcgagaggcgaattgcggcagcgcggcgatcggccgcgggcaccaggtgcacatctcggcggattccaccagcgcctgcagcatgccgaacgaatgcgcctggataatgcgctggcgcggcaggcgcacgccgtggcggtggaacacctcgtcgagcagcgcatcgaaactttcctgggtatagctcatcacccaatcctgctccagcagctgatgcagcgaggtgctgtgcgccagcgggtggccgcgccgcaccatgtacgccgtttcatactccagcagcggctcgcagtgaaactcctgcggcgccgacgacgccggcagcggcgtgatggcgaaatccatcgtgccctcacgcagctgcgactgggcgttggccatcaggctttccgacagttccagccgcaccgccggcaccttgctgcgaaacgccatcaccgccggcggcagcaccgtcagcatcagccagggggtaatcgccgccttgaccagatccgccgcactcccgcgcagcgccgccatttcgccctgcgcctgctccaactggttcagcaccagccgggcgtgcgccagcagggttttgccgtagggggtaaaacccagcccggtcggcgtgcggatcagcagcggcagcgcctgttcttgctccagttcgcgcagtgcgcgggtcaccgccgcctgcgacagccccagatgccgcgccgccgcgcgaatgctgccgctgtcggcgctggccaccagcgcctgcagttggtgcagtttcatgtccacctcctgacaatcataggttgtcagcataaccgaacggcggctacccggcaaaaacggagtttgctagtctcgatgcctgtccctctgcctcgttccgtgcccgttggccggaatccttttgccggagaccgtgatgaacccttcactggtactgcctgagatcgccgccgttcatgatgagatggtcgcgcttcgccgccacattcacgcccacccggagctgggcttccaggagtttgcgacgtcggatctggtggcgcagcggctggaggaatggggttaccgcgtcacgcgcggcgtaggacaaaccggcgttgtcgccacactgcagcgcgggccgggaaaatcgctcggcatccgcgccgacatggacgccctgccgattgccgaaacgaccggcttgccgcacgccagtacccattccggggtgatgcacgcctgcggccacgacgggcacaccgccatgctgctggcggcggcgcgctatctggcgcggcagccgaacttttgcggcacgctgcacctgatctttcagccggcggaagaaggcggcggcggcgccagagtgatgattgaagacggcctgtttgagcgcttcccctgcgacgcggtgttcgccatgcacaacgtgcccggcttacccaccggccacctgggcttcgcctgcggccccttcatgtgctcggccgatacggtgcacatcaccctgcacggccacggcggccacggcgcggtgccgcagagcaccgtcgatccggtggtggcctgcgcagccatcgttatgagcctgcaaaccatcgtggcgcgcaatatcgatccgcaggaaacggcgatcgtcaccgtgggggcgatgcaggccggccaggccgccaacgtgatcccggcgaccgccaccctgacgctcagcgtgcgcgcgctgacggcggcggtgcgtgcgcggctggaacagcgcatcaccgaactggtcacggcgcaggccgccagcttcggcgcccgcgcggagatcgactatcagcacggctacccggtgctggtgaaccacccggcagaaaccgaactggcgcgcgcggtggcgctggaatgggccggagagagccgagtgctccccacgctgcggccgttcaccgccagcgaagatttcgcctttatgctggagaagtgcccgggcagctacatctcgatcggcaacggccccgccacgccgggcaattccctgcacaaccccggttatgacttcaacgacgacagtctgtcgttgggcgccacttactgggtcaaattggtcgagcgctttttggctcgccccgcggtttaatcgccaacacagaggaaatgacatgaaaatcatcaaagggctgttgttgttgctgccgctggccgcgagctttcccgcgctgagcggtgaattcagcggcaaagtgatcaagctgggcatcgatcccacctttccgccgctggagtataaaaatccgcagggcaagctgaccggcttcggcgtcgatatcgcccaggcgctgtgtgaccagatgcaggccaaatgcgtgtgggtggaaagcagctgggacggcatgatccccggcctgcaggcgaagaagttcgacgccatcgcctcgtcgatgaccatcacgccgcagcgccggcagcagatcgctttctccagcaaagtctccaacgccccggcgcggctggtggcgcataaaggcagcaatctgcagcctaccgccgcctcgctgaagggcaaatcggtcggcgtgcagcaaggttccagccaggaggcctacgccaacgcgctgtggcggccggccggcgtcaacgtggtcgcctaccaaagccagcaggaggtgaacgaagatctggccaacggccgcctggatgcgtcgctgctggccagcgtcagcgccagcgaattcttcaaaacgcccggcggcaaagactttgcctttatcggcgccgaattgagcgacagcaagtacttcggcgtcggcgacggcatcggggtgcgcaaagaggataccgcgctgcttaacgccttcaacgccgcgctgcaggcgatccgcgccaacggcacttacaagaaaatcaacgacaagtatttcgatttcgacatgtacggcgcggagcagtaacacgcgttccccggcggtcacctgcaggtcctgcaggatggggaggcgccttcggccgccggggaacgccccaacggaaacggcagtgtcggcaagaacggaaaatcaggcgggataaggatgcgggccaggcaagacgcctggcccgataaggcgggttacttcacttcgcccatcgctttcagctttttggacagctcgcggcgttctttggacagatcggcatttttgatgatgtagtcatcaacgcgatcttcgtagtcgctgcgcatgttggcgatgatgccctgaatgtcttcgatgctcatgccgggcttgatgtactcactcaggttgtcgagcagcagcacgcgcttctggttatcacgaattttcttttcgttgtcgacgatctcgcgttgcagtttgtttttgcggcggaacatacgcacaaactccagcacgtcctggaaactcggcttatttgcattatccatctttatacccttgctttagtaatacacagattcattttcttacggccacatggcaccaagatacaggtttgtggcggtccggcacaacagtgattggcttatcttacccactttgccccggcggccaaaacccaaagcgccgccttcatgatctgaccccttattcgcgcccggcggcggtgcaaacctgaagcaaatcccccaactcttccaactgctgcgccagctccatgctgagccagacatagccgtaaatcggcgcttcgccgtgctggccaaggctgacctcttgcatcagcgttttcagctcgccggcgatctccgccaactgccccgccgccgcctgccgctgcgcctgcggcccttcgcgcatcagcaccgccaacgactccagcgagctcagcgtcagcagctgggtgctgcgcagcgtgcgggcgttcagcatgatgaagtgcgtttcacgcgaggcccagtaggcgtcggccatcagctccagcgtgcacaccagattgcggctgagggtttgcaccgcctcgaacaccgctttggggatgcgggtttccttgctggcgggcacgatcaggctgcgcagcttcaccacctgattcaacagatccttgagctgcggctccagccgcggccgctcaatgacgttcggcgaaaaatacgcgccgtagatacgggcggcggtttgcagacagtccgccatttgcatgcgccacagaatataggcgcgctgtgggtagatgctggtgaacagcagcgccagcagcgagccgaagatcacgtcgccgctgcgccacagcgcggtgtgcatgtcgccggcgcccgcgccgcacaccaccgccagcgtgatccccaccagcagcgccatatacggccgtttgccgagcgtcaggtaaccgcagacgaacatcaccacgccgcaccatgccagcatcagcggcagcgaatagagttccagatacagggcgatcaggccggaagccgcgccgaacaccgtaccggcaatgcgttgcagcgcccgctgcagcacgttgccccaaaacgagatcggccccatcaccaccaccagggtgatcagcggccaggtgccttcgggcaccgccagcaggcggatcagcagaaaggtcaggataaacgccagcccgatgcgcacgccgtgaacgatgcgatagtggcgataggtcagcagttcaaatgaagagatttttcgatcgaggcgcacagtgcctccgataaacaccagccaggccgctattttagcggaggaagcccggcaaggaaaaggcgaatgaggcgtccctcattcgcactcaggctcaggcgacgtatttgtcgaccagcgcgcgcagaacggcggcggtttcaacatccatcacgccgtcatacttctgcggacggaagtgcagctggaacgcgcgcaccagctggcgatagccttctgcggtgttcgccgccgaggtgtcgtagccgtattgggcgaacagcttcagcagctcagcctgcgccggcaggccctggctgcagtactcctgctggcgctgctgcttggtcgcttcgtcataccaggcgccgacgccggcctgatacagctgctgccacgggaactgcgggcccggatcgctcttgcggcccggcgcgatgtcggagtgcgccaccacgttcaccggcgagatgtccggataacgctgcaggatgttctgcgccagctgggtgaccgcctcgatctgctgcggattgaacggcgggaaggtgatgtttccaccgtcgccgctcgccaggttgacgatctcgatgccgatcgaggtgtcgttgatattgctgcgggtgccccactggctggtgccggcatgccaggcgcgctcgttctcgtccaccaggttgaaaatgcgcacgccgctgaagccggcggcctgataggtggcatcggtcggatccggcaccagatagtgcgcgctgaccgattttccggtcaacgacgtcaccgagtcggcgaagttttgcgccgtgtagtgcagcaccagaaagcgcacgcggtggccgaagctggcgaccgatcggtagctattgtaatcaatcttgtacatcgtaaagtccctctctcgtttgatttcactgagcggcctctcatcatgacaggccgctccgcacaggtgaacccttggctcaccctttttgttttagctaattgctaaataatgcgcaagcgttttttagcaaaaccgttatttacctttttgctaaagagtgcgatcattgcacgatggaaactaaagaaatcaggcgcaacaatctgcgcgaattaatggcccgctacgcccggcaaggcgtcaaccagaatgagttcgccacgctggttgagtcttccgcgccgacgctgagccaaatcatcggggaaaaatcctcccgcaatcttggcgacaatctggccaggcggatcgaggccaggctgaatttgcccaagggctggttcgacgtgtttcatgaaaagcagctggtgcgcccgtttgacaacgtggcggcggagtcggacttccagcccgcccgcttgaaaccggtggtatgggaagataccgaacaagacaaggaagagtttgtggagatcccgctgctggatatcgatttttccgccggcgacggctgctacgaaatcgtcgatcgcgaggagttttcgctgatcttccgccgttactatctgcacaagatgggggtggcggtcaacgccgcgcgcattatccgcatctccggctccagcatggaaccgcgtctgcaggacggcgacgtggtcggcatcaataccgacgacacgcgcatccgcgagggcaagacctacgccatccgccacggcaatttgctgcgggtgaaggtgctgatcgaacagccggacggcggcgtcgtcatccgctccctcaaccgggaagagtaccaggacgagcatctcagctatcagcagcgcaaggagcaactggtggtgctcggccgcgtcttctggtcgtcttcgtcctggtaacggacgataacctcgggcgcccgttgcgcccggcggttatttgaagtccaccaccatctgctgctggatagacagcccgcgcgtcgactgcacgcagccggcgatgtagtcggtgaaacgcggcggtttcggcatgcccagcttgaggatcttctcgttgctgaaacgcacgttgagcatggcgaacgatccgtacaggcgcatcgccttcagcatcagccgctcgttgcacgggccgaaaatgtctttcagctggcggcgcattttcaccagcgcgtcataggtcacctgcgcatactcatcgcccaccggcgctttttccagggccgccgccatggcgttgtcaatttcggcaaagctgacgctgctctcctcaccggcagagatgtgataaacgtcgttctccagcgtttcgctgttcatcaacatcaccagcgcatccgcgcagtagtccgccgggatcacgtcgatattgtcctgcagcgagcacatgaacttgcgcagcatcagcgccatgccaaacacccagaaaatgctgctggaaggctggcagcccaggcgggtgtgccccaccacgatcgacggacgagcgatggtcaacggcatttgcgggcagcgctggcgcatcagctgttcgatggtggatttggaacgggtatattccaccaggtgttcggcgtcttcctcaaactcgccgctctccgccaccagcgaacccggctccggcgaacaggacatggcggtgccgacgtgcaggaaacgttttaatcccggcacctgcgccattctttcggcaaaggccagagtgccttctacgtttaccttccaaatgagcgggttattaccaaatgaagcaacggccgcgcagttaataacgtgcgtaacattgttaatacgcgcgtcagttaaaaagtcggccggctcggaaaggtcgcccaataatatattttcaatcgtaattttagacagcagattcgcatcgatattaaacttttccatattcgcgcgaatacgggccagcccttgctgcgcatcgtctgcacgcaccagcaaaagataattaacagactgattttcaatcaataatttttcgagaaccgcaccaccaagaaagccggtagcgccggtcaacagtagcgttttcatcattgtcacccacattggcattgaatgtggttgattgtatccgcggatatttaaacaaatattaaatagaattacggcgcccttaaacacttttcttaatattatcttaaggaatcttttgaaacatccatcatgggtttagtaacaaaagaaccgcgtagactccatgattaatctccgccgtttaaataccattgatgtagtgcctgattaaatttaacggtcaatgttatttctcttctcgtccgtggaggacttatgacctataaccaaaaaatctggttgggggttttgctgctgtgcaccctgttttgggcggcagtgataagcggcgcctgttcgctgtataatcggacagatcgcctcaatgcgcaccaggcgcagagcgagttcgccgcccgccacagccaggcgccttgcgcgcaacccggtgctcaggcgtcgactgccccccggaatgggtagggacaatatccgctaacgatcctattatgccctaaggttaacagggagataacgatggctcgaaagctggatagcttaccgcaggcgcaacgcgagaaaatagaaaccgatttgctggccatcagcgtgatctacaacgagcgctacggcatcgcctcgacccagacggaaacggaacaacagatccccgaccacctgctcccctactttcatcagcggctggattactatcgccgtgcgtaattgcgcgcatttcgctaaccgccgcttggcatcgctccccacgccgttacaatagaggcatattgtatccgccactgaagagacgcgattttgagcagcaaggcaacggccacattttatattcacgattacgagaccttcggcaagagcccgtcgctggaccgcccggcgcagttcgccggcgtgcgcaccgatatggatttcaacattatcgaagagccgctggtcatctactgcgccccggccgacgattacctgccggaacccgaggcggtgatgatcaccggcatcacgccgcaggtggcgcgcgccaaaggcgttaacgaggccgagttcacccgccaaatccatcaggccttcagcgtggccggcacctgcattctcggttacaacaacatccgcttcgatgacgaagtgagccgcaatatcttctatcgcaacttctacgatccctacgcctacagctggcaaaacggcaactcgcgttgggatctgctggatgtgatgcgcgcctgctacgccctgcgcccggacggcatcgtctggccggaaaacgaagacggtttccccagcttccgcctcgaacacctcacgcacgccaacggcgtcgaacacacgcaggctcacgacgcgatgtcagacgtatacgccaccatcgccatggccaagctggttaagcaggcgcagccgcggctgttcgatttcctgctgcagcaccgcaacaagcacaaactgaacgccctgatcgacgtcgccgaaatgacgccgctggtgcacgtctccggcatgttcggcgcggcgcgcggcaacaccagctgggtgtcgccgctggcctggcacccggacaacaaaaacgcggtgatcatgtgcgatctcgccggcgacatgacgccgctgctgacgctgagcgctgagcagctgcgtgaacggctctacacccgccgcgacgatctggcgccggatcagacgccggtgccgatcaagctggtgcacatcaacaaatgcccggtgctggcgccggccaaaaccctgctgccggagaacgccgagcggctgggcatcgatcgccaggcctgcctgcaaaatctgcagctgctgaaacagcacccggaagtgcgcgagaaagtggtggcactgttcgccgaagccgagccgttcaaaggttccgaggacgtcgacgcccgcttgtacgacggtttcttcagcgacgccgacaaggcggcgatgaggattatccagcagaccaagccgcagaacctgccggcgctggatctggccttcagcgacggccgcatgaaagagctgctgttccgcttccgcgcgcgcaactatccgaatacgctggacgacgccgagcagcgccgctggctgcaacaccgccaggaaacgttgagcgcggagcgcgtgcagagttacctgctgcagctcgaatcgctgtataacctgcacgaaggcgacaaagaaaaaaccgccctgctgaaagcgctgttcgattacggcaaagagttggtgggataaaacccgcagcaagcagaaaaggaaaaggccgcgaaagcggccttttttgtggctgaggagacggctcgcgcttaggcggcgtcttcgctcgcttgcggcaccggcagacggaagctgcgggtaacgaaggccaggtagatcagaccgatggccgcccaaaccaggcccagcgtcatcgagctggcttccaggttgatccacagcgcgccgacggtcagtgcgcccatcaccggcaggatcaggtagttgaacgtgtccttcacggtgcggttcatcttgtcgcgaatatagaactgcgagatcaccgacaggttgacgaaggtgaaggccaccagcgcaccgaagttgatcagcgcggtcgcggtcaccaggtcaaacgacaccgcggacagcgcgatggcgccaaccagcagcacgttcagcgccggggtacgccacttcggatgcacatagccgaagaagcgagtcgggaacacgccgtcgcggcccatcacgtacatcagacgcgaaacgcccgcgtgcgccgccatgcctgacgccaataccgtcacgcaggagaacaccaggatcaccgactggaagaacttgcccgccacgtacagcatgatttcaggctgcgacgcgtcaggatccttgaagcgcgagatgtccgggaagtacagctgcacgaagtaagacaccacgataaagatgatgccgccgatcagcgccgtcaggaagatggctttcgggatcactttctctgcgtctttggtttcttcggacagcgagctgatgccgtcgaagcccaggaacgagaagcacaggatggtcgcgccggtaatcatcggcaccacgtgagcgttatcggaccagaacgggcggctgctgaccagcgtaccggcgccttcgccgtggtaaacgccgttgatcaccagacccaggaacacgatcatgatcgccacctgtaccaccacgatgatggagttcaggttggccaccagcttgatgccgcgcaggttgaaaatcgtcatcaacccgaccagcaccgccacgaagatccaggacgggacgcccgggaagatcgcttccaggtaaatcttggccagcaaaatgttgatcatcggcatgaacaggtagtccagcagcgatgaccaacccaccataaagccgacgtgcgggctgatggctttctgggcgtaagtgtaggcggaaccggcggaagggaacttcttcaccagcttgccgtagctcagggcggtaaacaggatcgccagcagagcgaaggcgtacgcggtcgcgacgtgaccatcggtcaggccggatacgatgccgaaggtatcgaagatggtcattggctgcagataagccagacccatcatcactaccggaactaatgtcagggttttacgcagctgagtgcgctgagccggagcggcgttaagggtgttatcggacattgttcagcccccccttaccttgagccttgcggatggcggacacgccaagacttaaggttgcggggaaacttcgcaacgagcgacttaattctaaaagaaggggattgtaagctggataacgggtcgaggtaacctcggctgctccatagtcgctgcggccacagcggaaaccggcgggcaccggcgctaaagtgaaaaattgccccatctttctaatcctcatgagtcacgaccataaagttttgtttgatcgtgcacgaaactatttatctatccggatcggtgtccggcctcgcttggtgtatgaaacgctacgttggtaaaacttaatgcaaaaaaaataaccgacgctttcaaaacgtcggctatctgcatttgagatattttgcaccagaatgcctccggatgacaagatccggaagccctcaaatacaaattctttttgtcgatcgaacggaaaaccagcccggcaggcgaattaatccgctaccggcaggccggtcgcccgcacatacttcttactttatacgcccattcaggcatttttcaacatccagtcgatctcggtttccgtcacccgccgttcaaactgcagcaattcgtccgtcttgcaggcgtgataaacttgggtgaaacgctcgcccagatagtgggtcaacgcatgctgatgttcaaactcgtacagcgcatcgctctggcggatcggcagcggcagcccctcctgctccagcccgttgccggtcaccggctcaggcaacggcagcgcgttgtccaacccgtacaacatgccggccaggatcgccgccatcaccagataggggttggcgtcggcgccggccacgcggtactccacccgatgattctccggttcgccgcagggaatgcgcagcgccacggtgcgattgttgtggccccaggcggcctggatcggcacatacatccccggttggaaacgccgataggcattgacgttcggcgccagcagcgccatcgacgccggcatcagggtgatcatcccggccagcgcctgtttcagcaacggtgaatcctcgccttcgccgtcggcaaacaggttgttgcccgccccgtcctgcatgctgacatgcacatgcatgccgctgccggcgtaatcctcatagggtttggccataaaggtggcgtgcataccgtggttctcggccaccagccgcaccaaccgtttcagcgccagcgcgtggtcgcaggccagcaagatgtcgtcggaatggcgcaggttgacctcgaactgccccggcgacgcctccgccaccgcgccgtccgccggcagcccctgcagcttcgccaacgcgtcgatatcgttcagcacctcggcgaaatggttcaggttatcgacggagtacacctggctttgggtattgcgctcctgagtgccgggcgcacacggcggctgcaaatcgccttctgcgtcgcgctgcctgtcgatgagatagaactccagctctaccgctgccaccgggaacaagccgcgctgtcgcagcgcctgccacacgcggttcagcacattacggggttcaacgtcaaagggagtgccatcttcatccagcatggtcagcaacacctggccgatatgctccggatcggcggccgacggcgtcagcgaaccgggcaccggcaggcaaatgcgatccggctcgccgagctcctgcccaagaccggtctcctccaccacgttaccgaggatgtccatggcgaacaccgacgcggggaagtagctgcctttttccagttttttcaaccctgagacgggtatacgtttgccgcggaaggaaccattgagatcggtaagaaggatatcgacatactgcgtggcgggatggcgttccaaataatgagcaacctcattttggaacgcgctacttcgcctctcttcatgatgctgtgcaaaatgttcaactgctgcgctattggtttgcatacgtcacccgccattatgctcttaaggcgcgttagcgcccgtccgccgttcgattcaacacatgattggatttctcgccaggtcgcgccgctggcgggcgctcaaaataacatccacaatatgaaacatagtattaacagaatgggtttgcaaatgttacaatcctgtttgattattcaccaccggctgctaaattgataaaatattgaccgaaaaggccttgctgccatttttacgtcaactatttcgtccaacgcaccgagagtgaacatgggcaatatattttccaaacctgccctaactatcgatatcatgcagcatcgttatcgcccagacaggcgcccgataacgatattcatgtctgcctgtcgcccctaccagaaggaagtaccgctatgagcgaagccagcttggcaccgggcaaacgcctgtcacagatccgtcagcaattgggtttgtcgcagcgccgggtcgccgaactgtccgggttaacccacagtgcgatcagcaccatcgaacaggacaaggtcagcccggccatcagcacgctgcaaaagctgctgaaggtgtatggcctgtcgctgtcggaattctttgccgaaccggaggccgtcgacgagccgcgcgtggtgatcgacgccgaggatctgattgagatcggcagccagggggtgtcgatgaagctggtgcacaacggcagccctacgcgcaacctggcgatgatgctggaaacctaccagcccggcaccaccaccggcgaaaagatcaagcatcagggcgaagagatcggcaccctgctggaaggcgagatcgtgctgaccatcaacggccagagctattgcctgagcgccggtcagagttacgccatcaacaccggtattccgcacagcttcagcaatacgtcggctcgcgtttgccgcatcgtcagcgcacacacccctaccaccttctgaccgcttctcgcaccggcgcagcctgacgcgggttgcgcccctgcccacccacgattttttcatcgccgttatgccattttgttggttgccaacggcgcaatctatgttacaacagagcaaaacagccatctaaacatctaaacggccttaacaccctatgtcaaccgcaacgccttcacgcctcgagatgcgcaatatctcgatcgccttcgccggcttcaacgcgctgcaggacgtggacttcacgctgcagggcggatcaatccatgcgctggtcggcgccaacggcgcgggcaagtcgacgctgatggcgatcctctccggcgcccacgatcattatcgcggcgagatcctgatcgacggccagccggtggcgatccactccccgttgcaggcgcgccgtcacggtattcacgtggtgcagcaagaggtcgacgtcgcgctgatccccacgctgtcggtagcggaaaacatcatgctggactggctgaacgagccgggccactggctgaactgggcggagctgcaccgccgcgccgtgcagctgctgcagcaatgggcgctgccgctcaacccgcgcagacgcctggcggactgcacgctggcggaaaaacagcaggtgctgctggcgcgcgcgctgtcgcaccgctgccgttttctggtgctcgacgagccgaccgcgccgctcgatcgcgccgagagcgagcgcctgtttaacgtggtgcgccgcctgcaatccgaaggcatcggcatcgtgtttatttcccaccgcatccacgaactgagcgacatttgcgatcggctgacggtgctgcgcgacggccggcgcgtcagcgaagacgccatgcgcgggctgagcggcgaacagatcgtcgagaagatgctcggccatcggctggacgacattttcccgccgccgcgcccgccacaccctgagcgaacgctgctgcaggtgcagggcttgcacgatcgccataagctgcgcgacgtttcgctgcggctgcatgagggcgagatcctcggcatcgccgggctggccggggcgggcaaaaccgaactgtgcaaggcattgttcggcgccagcgccgtgcagctcgagcgcggcgaactgcgcgggcagccctgggtgccacgcgcgccgcacctgtcggtcgaacaaggattggcgctggtgccggaagaacgccgcaaagaaggcattttcatcgacgaggcgatcccgatgaacctgagcgtcagcgccgacgacagcttctcgcgctggagcctgttcagccggcggcaagagctgcgctgggcgcgcgagatcatgcagcgtctgaatattcgcgcctccggcccgcaacagcggctggcgcgcctgtcaggcggcaatcaacaaaaagtggcgatcggcaaatggctgcgtggcgacgccgaggtgctgatcttcgatgagccgaccaagggcgtggacatcaaggccaaacaggagctgttcagcctgatcgacggcctggcccgcgccggcaaaggcgtgatttacgcctccggcgagttcgccgagctgattggcctgtgcgatcgcatctgcgtgctgtgggacggccgcatcgtggcggaattgaacgccgccgacatcgacgaagaaaccttattgctctattccaccggaggaacccctgcgtgagtaaagaatttgccttgcggcctgcgctgccctggcgccaacagctgtttgatttcctctacaagtggggcatgctgctgaccgtagcggcgctgatcgccctgtttggcctggcgtcggacaactttctcgatgccaacaacatcatcaatatcctgcgttcgatcgccatcgtgacggtgatcgccatcggcgtctccatctcgctgtcggtcggcggtttcgatctgtcggtcggttcgaccgcctcgctggccaacgcgctggtgatttcgctgttcgtctggcacgggttcggcaccgccggcgccatcgtagtgacgctgttgctgtgcacgctggtcggcctgttcaacgccctgctgatcgtggtgttcagaattcccgatatgctggcgacgctggccagcctgttcgtgatccagggcgtggcgatgacttacagctacggcggctccatcacccaaaacatggtgctgccgaacggcgacatggcggaaggcccgatcccggaagtgtttgccgctctcggtcaggtgccggtgatcgtgctgatcatgctggcggtcaccgtggcggtgcagctgttcctgtcgttgaccaagcacggccgccgcatgtacgccatcggcggcaaccccgaggcggcacgcctgtcgggcattcgcaccgtgcgttacagggttgcagcttacgtcatttcctcctggctggcggcgcttggcggcatcttgctggcgtcacgtattggctcttcgcaggtcaatgccggcggcggctatctgatggacgcggtggcggcggcctatatcggcttctcgctggccggcgccggcaaacccaatgcgctcggcaccctgatcggcgcggtgatcctcggcgtgctgcaaaacggcctggtgatgctctcggtgccctactacgccatggacattatcaaaggcctggtgttggcgctggcgctggccatcacctatatccagaaacgctgatcctctccggcgcacgtctgctgcgccgcttttccctttaattcatccggttactctttcccgccagaataacaagcatacaaatgatatgaattatcattatcgtttacattcagtaaaaaatccttacaatggcctcacgcaacgctgacgaagcgacggatttctcagcgaacgatgaattatttcattagaaattcaattggttaattactttcacttcaatccaggaaaggtttacctcatggaaacgccacgttacagcaagctcgccgctctggtgatcgcctcactcagcgccaccgccgcactggccgcgccgcaggacgacacccaagacaccatggtcgtcaccgcctccggcttccagcaaaaaattcaggactccgccgcctccatctcggtgatcccgcgccagcagatcgaagataaggcctatcgcgacgtgaccgacgcgctgaaagacgtgccgggcgtagtggtcaccggcggcgccagcagcagcgacatcagcattcgcggcatgtcttccaagtacacgctgatcctggtggacggcaagcgcgtcgacacccgcggcacccggccgaacagcgataacgccggcatcgaacagggctggctgccgccgatggaagccatcgaacgtatcgaagtggtgcgcgggccgatgtcttcgctgtacggttccgacgccatgggcggcgtgatcaacgtcatcacccgcaagacctcgcgcaccgagtggaaaggctcgctgcacggcgacgccacccttcaggaaaaccgcgattccggcgatctgttccagaccaacgcctacgcctccggcccgctggttgaaggcctgctcggcctgcgggtcaacggcctgctgtcgcgccgcgccgaagataaaatcaccaacggttacaacgagcagcgcatgcgcagcggcaccgcggtgttcaccctgaccccagacgagaaaaacgaattcgacttcgaaatcggccgctcgctgcaggatcgcaacagcacgccgggcaaatcggtggtagcggaacgctgcagcaaaggcaaatgcacgccgacatcgcgcagcgaaagcctgtatacgcgcaccaactacgcgctgacccacaacggctattacgacttcggcaactccaccagctacgttcagcgggaagagaccaacaacccgggccgcaaaatgaagatgtacaacaccatcttcaacacccagaaccagttcgagctgggttcacacatgctgaacctcggcggtcagtatcgctatgaaaaactgagcgacagcggcaaccagcttgaatcggcacaaggtctcagcaagctgacgcgctggagctgggcgctgttcgccgaagatgagtgggcattgaccaacgacttcagtctgacgaccggcatccgcatggatcaggacgaaaacttcggcagccactggacgccgcgcatgtacggggtctggcacctgaccgaacagtggacgctgaaaggcggcgtctccgccggctacaaatcgccggatctgcgccaatcctccgccaactggggccaggtcaccggcggcggcgtgcgtaaaggcatcatcgtcggcaacccggatctgcagccggagaagagcctgagcgaagagatcggcctgatgtgggatagcctgaaaggcgtcaacgccggggtgaccgtcttcaacaccgacttcaagaacaagatcaccgaagtgcgccgctgcgaagacacgccggactgtaagatcggcaatgacgtctacgactttatcagcgatcgcgtcaacgtcgacaaagccaatatgcgcggcgtagaagccaccttcggctggcagatcaacaaagactggaagtggaacaccaactacacctacacctcttccgagcagaagagcggcgagttccagggcaaggcgctcaaccagatgccgaagcacatggttaacaccgtgctggattggcgcgccacgcaggacctcagcctgtggtcgcgcgttaatttccgcagcaaaacgtctgagtatctgagccgtacctcgatggccaagagcacgccgtcctacaccttcgtcgatgcgggcctgagctaccaggcggcgaaaaacctgcagctgaccggcggggtctacaacatcctcgacaagaccgtggattacgatcactacaacaccacgctggacggccgccgttacaccgtcggcatgacctacaacttctgatgcccccgggcgcgcgctgcgcgcccttttcattccatcaccgtgaggaagccccatgaaattacgccgctcccccctgatgatcgccctgctggccgcgatggcgctggcgggttgccacagcaaaaccgacgcgccggcggccccggccaccgtcaacgttcagcacctgaacggcagcaccgaggtgaagaaacacccgcagcgcatcgtggtgctggattacgcctcgctggaaacgctgcagctgctgggcgtcgagccgctggcgctgcccggcaatcgcaaaaacttgccggatagcctgaagcgctatcaggacgacaaatacctcaatgccggcaccctgttcgagccggatatggccgtgctgcgcgccgccaaaccggatctgctcctgatcgccggccgggcgtccaaagcctatgacgagctgaacacgctggcgccgacgctgaatatgtccgtcgatcagcaggatcagttgggcagcctgaaacagcgcacgctgcagctgggtgagctgttcgataagcagcaacaggcgcaggcggcggtcgataagctggatgcgcagatcgcggcggtcaaaccacaggccgcccaggccggacgcgggctggtggtgctgttctccggcggcaagatcagcgcttacgcccccaagagccgtttcagcttcgtctatgacgccctcggcttcgcgtccgcgttgcagtccgatgaaaaagacgtgcgcggcaacaagctgacgcctgagcaggtggccaaactgaatccggactggctgttcatcatcgacagagacgccgcgaccgggcggccgaacgcggtggcgccgcagaaaatccttaccaccactgcgctgaagaaaaccgcagcggtgaagaaaggccaggtggtttacctgccggcggccgaggtttatctgtccggcggcatcgtcaccgcccagcacgtcgtcgaacgcgtgagcgaggcgctaacccacgctgcgcgataaaaaaagcccggcgatgccgggctttttcctggattaaatcgtcggctggtttaccaggccgtcgatcagcacctgcggcgtgccctgcgaacaacgctcgatgcgcccgcgcacgccgtagacccgcgccaggctctgcggcgtaatcacctgatccggcgcgccgtcggcgatcagatcgccatcctgcagcatcaacacgtggtcgccgtggcgcagcgcgatgttgatgtcatgcaccaccaccaccgtcacgatattgcgcttgcgggtttcacggcgcaccaaatccatcacgtggaactggtagttgagatcgagcgcgctcagcggctcatccagcagcagcagcgacggctgacggatcagcgactgcgccaaccccaccagctgtttctggccgccggatagttgatcgaggtagctcagcgccaggtgggcgatgcccagctgttccagcaaagccatcacttccgcttcgctgccggcgttgctgcggccgcccgaggcgcgctgcgccacgatgatcgactccagcacgtgcagatgcaccccggcgggcagcgactgcggcaggtacaccactttctccgcccgacgggcgaacggcatctgcatcagatcgccgtcgtccagccacagcttgccctgcgccgggttcagcccggccagcgagcgcagcagcgtcgatttgccgctgccgttcggccccagcagcacggtgatttgcccgcgcggcagcatcggcaccgagagattgtcgatcacctgacgcttcgggtagcccgccgagaagttttctatgcgcaagccctgattcatacgttcccccgatggcgcagaataatgctcaggaagaacggcaccccgaccagcgaggtgacgatgcccaccggaatgatcacgccgggcaccagatttttggacgccaccgaggccatcgacagcaccagcgcgccgatcagcgcgctggccggcaggtagaaacggtgatcttcgccgaagatcatgcgggcgatgtgcggcgccaccaggccgataaagccgatcggcccgacgaaagccaccgccagcgccgagagcatgctgatgcgcagcagcgtggtcagccgcagacggcgcacgtcgatgccgaagctcaccgcccggtcttcccccagacgcagcgcggtcagtttccacgagctcatcatcgacagcggcagcagcacggcgaataccccgaacagaatacccagcttgtcccacgaggcgcgcgccaggctgcccatggtccagaacaccagcccctgcagcgtgtcctcgctggcgatgaattgcatcatcgagaccagcgcgttgaaggtaaacaccagcgcgatgccgaacagcaccacgccggaggtggcgacccgcgtccagcgcgtgatgccgtcgagcatcagcgcggcgaacagcgcaaagataaaggcgttggcggagatgaaccactgatcgggaatacccggaatgccgatgccgagcacgatcgccagcgcggcgccaaaggccgcggcggatgatacgccgagggtgaaggggctagccagcgggttattcaggatggtctgcatttccgccccggccagaccgagcgcaaagcccaccaccaccgccatcagcgcatagggcaagcggatgtcccagacgatcacccgcgtgccggcatcggccgcggcggggtcaagcagcgtttgccacaaagacgacagcgacaggccggatggccccatggtgaaatccagcagcagcgaacccaggatcgccagtgccaacacgcccatcatcaacaggcgatggcgaagaatatgctgataacgccccatcacgccggcgttgggttgccccttggcgtcagtcatgggatcggtggatacgctcattcgttaagatacctgttacaaccatcatgacagcggcgcgaaggcgtccgccgtaaaccggaaagcgcgcggcgaccgcctgcgcgcagccgcccacaataaagcaaacgataatacttatcaatcatatcaataggtgaaaacagcgttgtcgaaatgtaataatttgttttttctcgccatttttcaaaccaccacgctttcccccgccaacggccagtaggttaattattctgaaaattattcctgatccgaccagactctgacaaatagcggcaaaaccacatagaatccaaaaccacagcaccgcgcgtgcaaaaaactttcaggccgccgcaagagcggccttattgacgaggctgtaatgagaagtccatctccggcggtaacgcccaaacgcccggcgctgctgaactggctgttgcacagcccgctgcacgccgatgacgaaccgtttcaacgccagctgcgtctcacgctgacgccctctcctctcaccccctggctgaatgccgtggggccggccgcgctgttggtggggtacgcctggctgaaccaaccgctggtcggtatcggcctgctgctgctgttgctgctgttgaccgccgggcgtgccaggttggcgcaaaggcgccaacccgcttggccgaacgccatgctggtgacggtgttgttgtgggcgctgctggttggcgccagcgccgcgctggcgatgctgtcgggccgcttcgtgctgatcctgttcgccggcctgaccatcaccgccctggcctgctggttgatgcagcgccatgccgccgcgccgcgcttcgcgctgcttgaggtgatcgcgctgacgctgccctacctgctggcggcgccgctgtcgcgcgtgcaaaatctgtttgtcatggcggatctcgcgccgctgtggctggtgctggcccatggcatgatcgcgcgctaccaccgccagttggtgcagcacgtcacgctggcctgggagaagcagcaggcatcgcaccgcgatcgcctgaccggctttctcaaccgcgcaggcggcgaggtggtgatgcgcagcatctgccgccccgcaacggcgcagccgatctcccacctgttcattcttgagttcggtccgctggcggcgctctaccaaagccatggcgtccagatcggcgacgacgtactgcgcaccgtcggcgagcgtctcaagacgctgatccgcccgagcgactacgtctgccgctataccggcggcctgtttttgattctggtgcacgatctgccctacggcgcggaaagcgagtttctggcgcgcatcgtgccaccgctggaagcgccttacgattttggcgcattcggcgaggtgaacatgcagctcaacgccggcattgtggcgctgacgcagcattatgcgacggtggaagatttgatgagttcggcgcagcaggcgctggcggaagccaaaggcgggaaaaagtaaagccaaacgcggcgggaacccccgccgcgtatcactcaccgaaaattacttcacgtccatcttcggaaattccatttcgctgtacttcacgacacgggtgccttgcgacagcttgtaaccgaaccagatcagcaggaacagcggaatgccgatgtaggtcgcggtcacgccgtaccagtcaatcttgtcttgcaggaaggcctggtagttctgccccagggtaatgatcaggcacaacacgaaggcgaagatcggccccagcgggaagaacccggaacggtacggcaagtcgttgagatcgtgtccctgcagcatgtaaccgcgacggaaacggtagtggctgatggcgatgcccaaccaggcgatgaagccggtcatgcccgaggtattcagcagccacaggtaaaccgactggttgccgaacatcgaggtcaggaagcacaacccggccaccacgcaggtcgcgtacagcgcgttgcgcggcacgccgcctttcgacagcttggcgaagatgcgcggcgctttgccttccgatgccagggtgtacaacatgcgggtcgatgcgtacatgcccgagttaccggccgacaacaccgccgtcaggatcaccgcgttcatcaccgccgccgccgacagcaggccggcatgctggaacaccagggtgaacgggctgacgctgatgtctttcacgtcattgcgcagcaggctcggatcggtatacggaatgatcaggctgatgatcaggatggcgaagatataaaacagcaggatacgccagaacacctgacgcaccgcgcgcggaatatttttacccgggttttccgattcgccggccgcgatgccgataagttcagtgccctggaacgagaagccgacgatcatggccacgccgatcatcgccgagaagccgccggcgaacggcgcatctccaatggtccagttctgccagccggcatgctcgccgcctttcagaatgccgacaatcatcagcacgccgacggcgatgaaaataatcacggtgctgaccttgatcagcgcgaaccagtattccgcctcgccgaaccctttcaccgaaatgtagttcagcaggaacatcaggccgaggaacagcgcgctccagatccagccgggcgtgtccgggaaccagtagctcatcaccaattgcgaagccaccaggtcaacggcgatggtcaccgcccagttgtaccagtagttccagcccagtgcgaaaccgaagccttcttccacgtatttggcgccgtaggtggagaatgaaccggagaccggcataaaggccgccagttcgcccagactggtcatcaggaagtacaccatcaaaccgatcagagcgtaagacagcagcgccccgccgggacctgcctgagaaaccgtggcgcccgaggcgacgaacaggccggtgccgatggagccgccgatggcgatcatggtcaaatgccgggctttcagctcgcggcgcaatccgggtgcttgctgccccgatgtttttatatcctgctgagccattcgttccctatctatctgctcttcgaaaaatgagggcggattgtaacaaatacccgccggtgaactagcaacattgcaccgatataagatagcttcataattcagaggcaattattagccgcgccccttatggccttacttactctcattaatgtgagcgcgcgcaggtttttatgctttctttggcctgcgcggcgatagaagacgtgacgcgctgtcgattacagcacgcaatagctgagaaaacgctgcaacgcgttggaaatgtgcttttgccgatggcggatcaggtacagcgtgcgccgcagcggcggcagcggcaccggcagttccaccagcgcgccgctggccaactgttccgccaccacccgccgggacaggcagctgatgccgataccgtgccgcaccgcatgcttgatcgcctccgagttgccgagctccatcaccagctgaaagtgcggcaggtgtgccaacagcagatgatccagcacctcgcgggtgccagaaccgcgctcacgcaggatccaaggcgcattcgccagcgcctccagcgtcggcggttgacgggtcagcgggttatccggcgcagcgaacaccaccagctcgtcctccagccacggctgcgtgaccagctccggcatatggcaaggcccttcgatcagccccagatcgacgcgaaaatccgctaccgccacgatcacatcctggctgttgccgacgttcagctccagcggcgtggccggaaagtcccggcggtaacgggcgatcatctccggcagcatatagttgccgatggtgctgctggcggcgatgcgcagcgccccgccatcatggcgaaacagctgctcgatctcccccgcctgctccagcagcgccagcgccttggggtacagcaagcggccgtgttcgttgatcaccagccgtttgccgacgcgatcgaacagctgcacgcccaactgcccctccagatccgccagcgccgcgctgaccgccgactgcgacagcgccagcaccaccgaggcctgagtggtcgaaccgcttttcagcacttcggtgaaaacttccagttgacgcaacgtgatatgcatagccgtcccggtattgaaagaaggttctgccagagaaccccaacatggtgatgtgggcagcccggccaggctaccccgtttgcggccagatcggcgcgctatttgcccaaggcgaccagctgcgccgccgcggccagcaccggctctcgcggcgtgccggcttcgtcccgcagtatcaattgcagcatcgccgcgagatgctcgcggtcgatcgtcttgttttcttcaatcaaccgccgcaccgcgcgccccacttcctgatctacctgctctctgcgttgatcgtcggtatccatcgcctgctcctgttagttggaaagttgacggcggctcgccgcacttcctcaccctagccgcaatgcggcgttatgccaatgcctgatcccataccacttattcagataggttataaatatataatcaatttctcttttattcagcccaaacgtactcttagcagcaagaaacagactgaaggactgacttttatggcgactgataccactcacacttatcccgagcgacgcttttcgctgtttggcctgccgcggctggtgccggggctggcactgaccggcgcgctcaccgcgctggccgtctgggccggcgatattccctgggtggcggagctggggctgggggcgctgacgctggcgatcctgctcggtattctggtgggcaacacgctgtacccccactggcaaaccgtttgtcacagcggcgtacagctggccaaacagcgtctgctgcgtctgggcattatcctttacggcttccggctgacctttcagcagatcgccgacgtcggcgccagcggcatcatcatcgacgcgctgactctgatcaccaccttcctgctggcctgctggctcggcaagaaagtgttcggcatcgacagccaaaccgcgatactgatcggcgccggcagcagcatttgcggcgcggcggcagtgatggccaccgagccggtgctgaaggccgactccagcaaagtggcggtagcggtctcgaccgtggtggtgttcggcaccctggcgatcttcgcctacccgtggctgtatcagttgaatgaacacttccagtggctgccgttcagccaggaaaccttcggcatctacgccggctccaccattcacgaagtggctcaggtggtcgccgccgggcacgccatcgggccggacgccgaaaatgcagcggtgatcgccaagatgatccgcgtgatgatgctggcgccgttcctgctgctgctgtcgggctacatcagccgcggcagcgcaggcaaggcggaaaaatccgccatcaccattccgtggttcgccgtgctgtttatcgccgtcgccgggctgaactccttcaacctgctgccggccacgctggtgcgccatctgatcaccgccgacacctggatgctggcgatggcgatggcggcgctggggttgaccacccacatcagcgccgtgcgccaggccggggtgaaaccgattctgctggccacgctgctgttcgtctggctgctggtcggcggcggcgcgataaaccaactggtgcaacactggttctaaactccccttctgcggcccgcttcggcgggccgcatttattccgcccgccatcaatgccataatgtcaccgataacacaggagaatgaagatgaagtttgtcggtgcacatgtcagcgcgtcaggcggcgtggatcaagcggttatccgcgcgcacgaattggaggcgaccgcgttcgccctgttcaccaaaaatcagcgtcaatggaaggccgcgccgctggccgcggacgtgatcgataagttcaagagcgcctgcgcccagtacggttatgggccggggcagatcctgccgcacgacagctacctgatcaacctcgggcacccggtggccgaggcgttggaaaaatcgcgcgaagcgtttatcgacgagctgcagcgctgcgaacagctggggctgacgctgctgaacttccaccccggcagccacctgctgcaaatcgatgaagataaatgcctggcgcgcatcgccgaatcgatcaacatcgcgctggacaaaaccgccggtgtgacggccgtgatcgaaaacaccgccggccagggcagcaatctgggcttcaaattcgaacacctggcggcgatcatcgacggcgtggaagacaaaagccgcgtcggcgtctgcatcgacacctgccacgctttcgccgccggttacgatctgcgcaccgaagagacctgcgaacacaccttcaaacagctcggtgacatcgtcggtttcaactacctgcgcggcatgcacctgaacgacgccaagagcgagttcaacagccgcgtcgaccgccaccacagcctgggggaaggcaacatcggcaaaacggtgttcagctacatcatgcgcgatccgcgtttcgacaatatcccgctgattctggaaacggtaaacccggatatctgggcggaagagatcgcctggctgaaggcgcagcagtaaccctcccttggccgctcgcctatgcgcgagcggtttcccccaccgtgtgctctgccgccagcatggcgccgaactgacgcagcgtctctgcctccaggcccgccgccctaaacaccgcggtggtaaagctgaccggcgccgagcccggtgccgtaatgacacggtcatccacgacggcggcggcgctcgcaacgtaatggcgctgcccgctgtagccctcaacattgcgcgtcaagaactcggcatcgttggaggtatgcgccctgccgttcaacaggccggcccgcgccaacgccaacgtcccgccgcaaatgcccgccagagtcgcgccgcgttgagactgctcgttgagcaacgcgcggatatccggcgcccgttcggtttcccacagggtgccaccgaccaccaccagcacctcggggcgccaatccgccagttcggccacgcttttttcaacctcgaccgtcaacccgccctgtgagcgaagcgttccggcctgcggcgcaaaaaacgccacctccagcccataaaacgggccgccaacgccggcaatcagcgcgtattcccaatcggcgaaaccgggtgtcagtacgatcgccacttttttagccacggatgaatctccttgagtcattgcttgttcgcaggaacaaagtcgcgctatcagcttagaaagcgttgtggtttctgaccaggggtaatcgtgctaactgcctaaggcacaaacaaaaacgcgcagcccggggctgcgcgttttgcggtatcgcgaggcttacgccgcggcggtagccggtacttcagcacgtttcagcagggcatacgctacgcccgccagcagcgtaccggcggcgatcgccaccaggtacagcaacaccggcgaaatcgcgcccgggatcagcagcacgaacagcccgccgtgcggtgccatcagtttggcgccgaaggccatcgacagcgcgccggtcagcgccccgccggcgatgcagcacggcagcacgcgcatcgggtcgcgggcggcgaacggaatcgccccttcagtgatgaagcacagccccagcaccaacgccgccttaccgccttcctgttcggatttcgggaacttgcggcgcgccagcagcgtcgccagccccatcgccagcggtggcaccatgcccgccgccatgatcgccgccatcggcgcatacaccgaagagctgagcagcgccacgccgaacgcgtaggccgctttgttcaccgggccgcccatgtcggtacacatcatgccgccgaggattgcccccagcagtacggcgttggcggtacccagcgattgcagccaatgggtcagaccttccatgatcttcgccaccggcgtgccgaccacgtaaatcatgatgaggccggtgatcaggctggcgaccagcggaatgatcaagatgggcttcagcgcttccatactttgcggcaggcgcagcttgctgctgatcgccttggcgacgtaacccgccaggaagccggcgatgatgccgccgaggaacccggcgccggtgctcactgccagcatgccgccgatcaggcccggcgtcaggcccggacgatccgcgatggagaaggcgatgaaaccggccaacaccggcaccatcagcgcaaaggcggagccgccgccgatctgcatcagcgccgccgccagcgtgcctttgacttcaaacgccttgatgccgaacacgaaagacagcgcgatgcacaaaccgcccgccaccaccatcggcagcatgtaggacacgccggtcagcaggtgacgatacgggccgttgccctctttctttttcgccgccggcgccgcgccaccgcgctgctgcggctggaacacttcggcttcggcctgcgccttgtccagttcctgggcggttttcttcagcgccagaccggtggaagtacgatacatcggcttaccggcaaacttgtccagatccacttcgatgtccgccgcgacgatcaccagatccgccgccgccacttcttccggggtgatggcgttgccggcgccgacggaaccgcgcgtttccaccttcacccaccagccgcgtttcttggcttcactttcaatggcttcggccgccataaaggtgtgcgccacgccggtagggcaagcggtgatcgccacgatgcgtttttgcccattggctttcaccggtgccgccgcctgcggcgcctgataggtttcagcttcggccttggcacgcgccagaaaagcgtccggttcccgcaccgcctgttctacctcgcccacatacaccaatttgccgttcagcccggcgtcagcaggagcagcctgccccgccaccgccaccagttcggcgtcctgcagtgactcgaccagcgtcaggccagttttggccgcggcggcctccagcatgcgtttcgccaggtggccacgggcctgccccagcgaactgtctaccatcagcagcgttttcattctgcctcctgctattgattgaaaggtttcagatcgacgcgcgccatcatcgcggccaactggggacgatcggtcacgccgacgttgctttggctgaccgccagcgccgctaccgccgtggccagacgcagagtgtgttcgctggattcgcgcatcagcaggccgtaaatcaggcctccgaccatcgaatcgccggcgcccacggtgctgaccacctcacaggacggcggtttggcgatccaggcgccggaggcgttaacccacagcgcgccttccgcaccgagggagatcaccacgtgggcgatgccctgctcgcgcagcgcatgcgcggcctcaaccacgtccgccagcgtcggcagcgggcggccggcccagatttccagctcgcggcggttcggcttcaccagccacggcgaggccttcaacccggcgaccagcgcttcgcggctactgtcgaaaatgatgcacgggcacttggcgcgcagctgggtcatccagtcggtaaatgcgtcaggatcgacgccggccggcaggctgccgctcaccgccaccatgtcgaactggcccagccagctcagcgagtcgctgacgaagcgatcccagtcctgcggcgtcacttcgaaaccggagaagttgaagtcggtgacttcgccgtctttttccgtcagcttgacgttgatgcgggtacggcctggcaccacctgaaagcggttggcgatccccagatcgctgaacagcagctggaaaccgtcctgattgtctttgcccaggaagccgccgacggtgacgtcgatgcctaaatccttcaacaccttggcgacgttgatgcccttaccggcggcgtgcaggccggcggtttttacccggttgacttccccgcgttcgatctgcgggcagaaacccaccagatcgtacgccgggttcagggtgatcgttgctactcttctgctcatgctgcgccctcgcccagtccttcattaatcgcttcgccaatcgccttcagcgcggcttcagcatcttctccattggcggtaaagcgcaggtgatgccctttcttcacgcccagcgccaccaccttcatcaggctgcgcccgttggccggcttgccgctgccgtccaggttggtgacggtgatgtcactgttgaaacttttgatcacgttgaccagcgccgtgcccggccgcgcgtgcagaccgtgctcgttgcggatcacgaactcggcgctcagcacgctgctctcctcagccacttcgctggtcagcagcgccagcacgccggcggcatccgccttcagcaagcgttcagctttattggccagcagcagatcgctgaggtagttgagcaccgccagcggctgcgcgtcggcgaccgacaccgtcagcagcagcgccaccggctcgccgtcttccacgaaagcctgcgccgggcggctaacggtggccgcgctggccaggttgccttcgacgctgtcgctcagccagatgccctgccccaggttcagcggcttgcgggtgatgacatcgctgacgaactgcgcgttgaccgcgccggccttttgcagccggccggcgttcagcgcctgcagcgtcatcaggctgtcggcggcgacgtcgagcgcaatcagcgaaacgtcgaactggaattcggcgctctgctgctcgcccatcagcaggctgcgcagctcttccgcagaggtggtttgtgccagccgctccgccacgctgtcatcgctcaggacgtgggtgagctggcgcagcagcgccaaatgctcgtcggagcgggcggcgatgccgatcgccacataggcggtctggccttcgccccacgcaatgccctgcgggaactggaacacctgcacgccggttttcaacaccagatcgcgggtatcggtggtgccgtgcggaatggcgatgccgttgcccagataggtggacgtctgcagttcgcgctgcagcatgccgtccacgtaaccggcgctgacgcagccggcttcggtcagggcggcggccaccaggtggatggcctcttgcttaccgtcggcaacggcgcccagatgaatgtcttgcggtgacaactggaacatgattctcctctcctgctgaattgaatcgtttcagcttcattgagaaaaaggagcgttatccgttcgtcataagcggccggacaacgctgaaacgtttcaaggagtgtgtgagcagcacaaggcgaaagcaagctttctccctttcgccattgcagatttttgagcttacgcacactttttccggcgtattggccagcgccggggcaaaatgacatactgtgctgaaagcttgctgacggagaaaagcatgaacgtagtgacaggcgtcggggtgatcatcgtcaacccgcaaggcgagattttgttgggcaaacgctgcggttcccacgcgcccttttggtcgatccccggcgggcatctggatgccggtgaaaccttcgagcagtgcgcccagcgcgaaatcgccgaagagaccgggttgctcatcgacccgccgcgctttgttggcgtcagcaacaatctgcaaacctggcgcgccgaaggcaaacacacggtgtcaatctgcctgcaggtggatcaccccggcggcaacgccgagctgagagagcccgagaaatgcgccgagtggcgctggtgcgcgcctgaagccctgccggaaccccatttcgaagccagccgcaccgccatccgcctgtggctgagcggcctggcctatttgcccacggcctgacccatcgcgagcgcgtgctgcgctcgcttcccctgccgcagcgccctatcgctatataaattggaatataacgctattttttgcgatatacgccatttttttgactacggataaccctatggggttaaccctcttctatcattacccctgcaatcgacgtggcattctgacctccggtcggcggccttttggcaagattttattttaaattcataattataagcgggtttaccatgagcaaaaaactgactggctttgaaaaaaagcgtcggtggggatggctatggcttttgctgctggggattatcctcggcgcagcgctgttggccgggaccgccaccgtcttccataaaaccagcgataccgccttctgcgtttcctgccacaccatgcaacagccgctggccgaatatcagggcagcgtccacttccagaacaccaagggtatccgcgccgagtgcgccgactgccacgtgccgcaccagccgatcgactacctgtggaccaagatccgcgcggtaaaagacatctacggcgagatggtcggcaccatcgatacgccggagaaatacgaagcgcacaagctggcgatggcacagtcggtctggaagacgctgaaagagaacgactcggccacctgccgctcctgccacagctacgacgccatggacatcactgcccagcgccctgaggcgcgcctgcagcacccggtggcgatcaaacagggcgaaacctgcatcgattgccacaagggcgtggcgcatatcctgccggacatgagcggcgaaacccaggccggcgccgccgagctggcgaaggccgcggcgctgaccgcaccggacgccaccaccctttacaccatcgccaccgaaccgttcttcctcggcgcagacgacagtcataacgccggcaacctgatgccgtccaccgaagtgcaggtggtcaagcaggatggcgacaaggtgctggccaccgtgagcggctggcagcaggacggcgtcagcgaagtgttctacgccgcacagggcaagcgcatcctcagcgtgctgctgggtgaagacgcgcgccaacagctgaagaccgcgtcgactcagaccgatgcggaaaccggcctgatctggcatcaggtctctctgcaggtgtggctgccgcgcaagcagctgatcgacgatcagcaaaaaatctggcgctacgccgcggacatgatgtcggccaactgcaccggctgccacgggctgaccgcgctcgatcgcttcaacgccaaccaatggatcggcgtcatcaaaggcatggcgccacgcacctcgctgacgcaggaacagctgcgcgtgctgacgcaatacgtacaaaaacacgccagcgacatgccacctgccgcaccggccaagctttaagggagaagcgcaatgagcaaccaacaaccgttaaccatgagccgccgccgcttcctgaccggcgccgccgcgctggccgccgccccgctgctggcgggcttatggcccaaagcggcgctggcgcaggccatcagcgaagcgctgccgcagttcatcgtcttgcgtcaggcgcaaaaaggcattctgaccggcgcccactggggcgcgtttgaggccatcgtgcaggacggcaagatggtcggcgtgcagccggtgcaggacgatccgtatcccaatgagctgatcaccatggcgccttatcaggtgcacgccgagaaccgcatcaaatatccgatggtgcgcaaaagctggctggaaggcggccccggcagccgcaccgaactgcgcggccgcgacgagtgggtgcgcgtcagttgggacaaagcgaccgagctggtgtgcaatgagatcgttcgcctgcagaaagatcacgggccgcagtcgatctacgccggttcttatggctggaaaagcgtcggcatgctgcacaacagccgcacgctgctgcagcgtctgatgaacctgaccggcggcttcctcggctacgccggcgactactccaccggcgcagcgcaggtgatcatgtcgcacgtggtcggctcgatggaggtctacgaacagcagaccgcctggccgaacgtgatcgagaacagcgagctggtgatcctgtggggctgcaacccgatggtcacgctgaaaaacagctggaacgtgccggatcacgtcggccagaccggcttcgaggcgctgaagaagaaaggcacccgggtgatcagcatcgatccggtgcacaacgacagcgccaagttcgtcaatgcgcagtggatcgccccgcgcccttataccgacggcgcgatgctgatcggcatcgcccacacgttgctgaccgagaagctgcataacccggacttcctgaaaacctacaccgtcggcttcgacaagttccaggcctacctgctgggcgagagcgacggcgtggcgaaaaccgccgaatgggcggccgacatcagcggtgtcgatgccgatacgctgcgcggactggcgcgcgagatggcgaagcatcgcaccatgatcatgggcggctggggcattcagcgccagcaccacggcgagcagcagcactggctgctggtgacggtggcggcgatgctcggccagatcggcctgccgggcggcggcttcggcttcagctatcactattcctccggcggcagcccgaccgccaagggcggcatcatcgccggcatctccgccggcaacgcgccgaagaactccccggcgccgatcccggtggcgcgcatcgccgaatgcctgagcaacccgggcaaaaccatcgacttcaacggtgccaaggtcacttaccccgaggtgaaaatggtgtatgtggcgggcggtaacaccttccaccagcatcaggacaccaataacctggtcaaagcctggcagcggccggacaccatcgtggtcaacgagccttactggaccgccaccgccaagcatgccgatatcgtgctgccggccaccaccagctacgagcgcaacgatctggaaatgggcggcgactattcgcagctctacgtgttcccgatgcatcaatgcgtgccgccgcagcacgagtcgcgtagcgacttcgacatcttctcggcgatggcggccaggctgggcgtgcaggaagccttcaccgaaggcaaggatgaaacccagtggctgaaaggcatgtacgacgacatgaagaaccaggcgcgcgccgcgcgggtggcgctgccgccgttcgacatgttctggcaatccaacaactacgtgcgcttcccggtgccagaggccaataagcagtgggtgcgcttcgccgactatcgcgacaacccgctgctgaacccgctgggcacgccgtcgggcaagatcgagatctactccgacgccatcgccaaaatgcattacgaggattgccccggcattccgacctggatgccgccgcacgagtggtatcgcgggccggaagcggccaaatatccgctgtcgctcaataccgcgcacccgaccaaccggctgcactcccagctcgataacacgccgctgcgcgagaaatacgcggtagcggatcgtgaagcgatcctgatccacccgcaggacgcgcagccgcgcggcatcagcggcggcgatctggtgcgggcgtttaacgatcgcggtcagatcctggtgggcgcggtggtcagcgaagacgtgcggcccggcgtggtgcgcatcagcgaaggcgcctggttcgatccggccgatccggcgcagcccggctcgctgtgcaagaacggcaacgtcaactgcctgaccttcgacatcggctcttccagcctggcgcagggcaactgcgggcagatggcgcagctgcagatcgagaagtatcgggggccggtattgaaaaataccgcgcacgcggtgccgcaaggcgcctgatcccgcggtaaacagagggcgcaacgcgtaatgccggtcagttaagcctgaccggcatttttttatccagtctcagtacgcgccgtgcaaaaggaatagccttaaatatccggtatttctctgcgaccgctatgaacggcatctggagagacagccactacgccggtcccccacaccattcggggcggctgcgatggcggcaggcgcgacgctgtgtctgtggcggttgaaagacgcttaaggcgcggtgtccgcttccagtctggcgaggtagatcagcgcctgatcgcggtgatcgtggcacatgtcgcggctcggctgcaggctgccgcacaccttcggccgcagcggcgaatgaaacaggccgcagcgcagccgttcatccagatgaatgcagcgggtattggcgggcttgccgttcggcatgccggggatcgggctggatattgacggcgcgatacagcaggcgccgcagtcgctgcgacagtccatcagcgctactcctggtgggctggggggaaagaagcgcgacaatagcagccgcacgcggccaccgccagcagaatccctgcgtccccgcgatctttacactcatcgctctgcgccggccggctgcacccgatggcgaataaacgcccagcaaaccttgatttaaagaaaaaaacgcgtgaaacgtgcaattccttcgctttacatgcgccatgcgcccatgtactattgagctagtacaaaagaacttcttccctcaggagcacacatgtctacggacaccatccagaagctggcccgcccttccgtcctcggcggcgcgatgatcattgccggaaccgccgttggcgccggcatgttttccattccgatcgtcacttccggtgtctggttcagcggctccgtcgcgctgctggtgtatacctgggcctgcatgctgctgtccggcctgatgatcctcgaagccacgctgcactacccgagcggcgccagcttcaacaccatggtcaaggatctgctgggcaaaggctggaacgccgtgaacggcctgtcggtggcgttcgtgctgtacatcctgacctacgcctatatctccgccggcggctcgatcatcgcgcacacgctggagggcatcgtcggcgtcggccagactaccgccggcctggtgtttgcgctggcggtggcgtttatcgtctggctctccacccgcgcggtcgatcgcctgagcaccattctgatcggcggtatggtgatcaccttcgtgatgtcggtgggcgacatgttcacccacgtgcagcctgcggtgctgttcaataccggcgatgaccaggccagctatctgccttacgccctggcggcgctgccttacctgctgacctcgttcggctaccacggcaacattcccgggctggtgaagtactaccacaaggacagcggctccgtggtgcgcagcctggtgtacggcaccctgttggcattggctatctacatcctgtggcagtatgtgattcagggcaatatcgcgcgcgacgccttcaagcaggtgatcgccgagggcggcaatatcggcagcctgctcaagcaaatgggcaacgtctccagcagccagaccgtcagccaactgctgaacgccttctcctatatggcgctggccagctcgttcctcggcgtgtcgctgggcctgttcgattatctggcggacttctgcaagttcaaggacgacgccgtcgggcgcagcaagaccgcgctggtgaccttcgtgccgccgaccctggccgcgctgctgttcccgaacggtttcctgtacgccatcggcttcgccgggctggcggccaccgtctgggcggtgatcgtgccggcgctgatggcgcgcgccagccgccgccgttatccgcaggccggttaccgtgcaccgggcggcaacggcgtgatcctgttcgtcatcctgtttggactgatcaacgccgccgcgcatattctgtcgctgttcggcctgctgccggtcttccagtaatccccgacgggagggctgccgccctccctttcccgcactgtttttgcgccgggctattgcctgaaatcggcggcgcgagtaccttgtcgcaacttctctaatactcttcattgcggatgaattgaaatggcaagagctaacgaaattaaacgcggcatggcgatcagctacaacggcaagctgctgctggtaaaagatatcgacgtgcagagcccgagcgcccgcggcgccagcaccctgtacaaaatgcgcttctccgacgtgcgcaccggcctgaaagtggaagaacgcttcaagggcgacgatatcctggacaccatttccctgtcgcgccgcaaggtgaacttctcctatatcgacggcgaagaatacgtgttcatggatgacgaagactacaccccgtacattttcaagaaagaccagatcgaagacgagctgctgttcattccggaaggcggcctgccgggtatgcaggtgctgacgctggatggtcaggtgctggcgctggagctgccgcagaccgtggatatggaaatcgtcgagaccgcgccgggcatcaaaggcgcttccgccagcgcccgcaacaaaccggccaccatggcgaccggcctggtgatccacgtgccggaatacctcagcgccggcgacaaaattcgcattcatatcgccgaacgccgctacatgagccgcgcagactagtcgcgcctacggggccgatactcggccccgtttcattttccgctacggcaattccgggaaaaagcgccgcttgagcgccagctcgacgccgcgcagctccgccagccctttcaaccgcccgatggccgaatagcccggattggttttctttttcaaatcgtccagcatctgatgcccatgatcggggcgcatcgggatcggccgccgatcgcccgcccgctgccgacgcagttcttcggtcagaatcgcttcgatcaccgccaccatgtccacatcgccctgcagatgcgccccctcgtggaagcttttcgggttttcttcgcggcaggtggcgcgtaagtgggtaaagtgaatgcgatcgccgaaggtttcaatcatccgcaccagatcgttgtcggcgcgcacgccgtaggaaccggtgcacatggtgaagccgttatgaatgctgtcgacagtctgcttcagccactgcatgtcttcgatcgtggagacgatgcgcggcaggccgaggatcggccgcggcggatcgtcgggatgcaccgccagccggatgccggcctcttccgccaccggcacgatggcacgcagaaagaccgccatgttttcgcgcagttgcgccttgtcgatgccgtcgtattccgccaggcggcgacggaactgctccagcgtgtagccttcttccgcacccggcagcccggcgatgatgttgccggtcagcgtggctttctcctcctcgctcatggcggcgaaataggtcgccgcctgactgcgctcttgcgccgtatagtccgcctcggcgccggcgcgctgcaggatgtgcagctcgaacgcggcgaaggctacctgatcgaaacgcagcgctttggaaccgtccggcagcggataggccagatcggtgcgcgtccagtcgaggatcggcatgaagttgtagcaaacggtgtcgatgccgcaggccgccagattgcgcagtgactgctggtaattggcgatgtaccgccgccagtcgccgctgtgggttttgatctcctcatgtaccggcacgctctccaccaccgaccacaccagccccttttccgccagcagcgcctgccgcgcgcggatctcgtcgatcggccagacttcgccgttcgcaatatggtgcagcgccgtgaccaccccggtcgccccggcctgacgcacgtcatccaaagagaccggatcgttcgggccataccaacgccatgtttgttccatgttgtgtccttatgcctgtctcgcatcgcgatgttgttataccagtttaatttagatgtcagctagctttaacttactctttcgccgtgcgctgtcaaaattgaaccgttcattggttgatccgcttcacgattctggcttattttggcctgaccaattcccttaacctgccgacaactttagactggtggcagttttttatcgtcagcgcgcccttgttgatggggcgacaaactggtccgctaacttgacgcaagtggcccgccagctgtctactcgctttggagatgagatgaatacgatcgccaacaccccgctgccgggcgccgtccggcaaccgaattatgatcgccgggccctgcgcagccgcatcgtgcacctgggtttcggcgcgttccaccgcgcgcatcaggcgctgctgaccgatcgggtgctgaacgcccacggcggcgactggggcatttgcgagatcagtctttccggcggcgtgccgctgtttgaggcgctgcggcaacaggatcatctgtacagcgtgctggagaaaggcgcggacggccatcaggccatcgtgatcggcgcggtgcatgagagcctgcaccgcaaactggagggcatcgccgcggtgctggagaagctggccgaaccgcaggtggcgatcgtctcgatgaccatcaccgaaaaaggctactgtatcgagcccggcagcggacggctggaccgacagcattcggggatcgtcgccgatctggcgtggccgcatcagccgcagaccgcgcccggcattttggtggaagcgctgcggctgcggcgcgaacgcggcctgcccgccttctccctgctctcctgcgacaatattccggagaacggccacgtgttgcgccgggcggtgctcgatctggcgcaggcgcgggatccgtcgctcgccgactggatcgccaccgccgccaccttcccctgcaccatggtggatcgcatcgtgccggccgccacgccggccacgctggatgagatcgccgccgcgctgggcggcgtgcgcgacgaatgcgccatcgcctgcgagcccttcattcaatgggtcgtggaagacaacttcaccgccggacgcccggcgtgggagttggccggcgcccagttggtcagcgatgtgctgccgtttgaacacatgaagctgcgcatgctgaacggcagccactcgttcctggcttacttaggctacctgggcggctaccgctatatcaacgagtgcatggcggatgagcactaccgccgcgccgccctgcggttgatgctggacgaacaggcgccaacgctgagcgtcaccggcatcagcctgcccgattatgccgcacagcttatcgcgcgcttcagcaatccggcgctgcaacacctcacctggcagatcgccatggacggcacgcagaagctgccgcagcggctgctggatgccgtgcgctggcatctgcggcacggcggcgactatagcgggctggcgctgggcgtggcgggctggatgcgttacgtcggcggcgtcgatgacgccgatgagccgatcgacattcgcgatccgctggcagacctgctgcagcagacgatcgccgcaacgcaggacgatcgacggcgcgtagcggcgctgttggcgttgaaatcggtattcggcgaaacgctggcggcgcatgcggcgtttagcgaagcggtgacgcaagcctatttatcgctgcgcgatcgcggcgcgcgtgaaacggtgaaggagtgggtaatgcggtgaggagcctgcagggccgagaataaccatgccggcgtaacgttacgccggcatggcggaacgacttaacgataaacgaccgtcataacagcgagtttcttctgttggtctacccacttcatttcggttgtgcctagatttagcggaagttctttgcgtgtagtatcaaaacctgacaacgcttgctgggcctgataatgctggccgttgcggtaacattgcgtattcgccttagaatctgcaatcttgaccgtgcaaggactttcaacgatagagccgacgaagcgaattaccccgccggccactcctgcctgactcactgccgtccatgaaaacaacattcctacgatcaaaaataaccgaaaggtattcatggcaacctcatttttagttaagccaatttaaccatagaggatcttgttaggaataatcgcaaggaaagggacgagatttgatcgttaatctcgtcattaacaatgtaaaaacaagctactaacaaaagttaaccgcatctaatacagggttttatctaagaattttcttgttataaacggtggattttgtcggttgaaaagcgcatggtgacgtgcaaaatttgcgagatagagcacaaattaaatcgcggccgtttcaccgacacggctgcgtaactcatttattaagcaggttaatttttgcgccaggaattattaatgaccaaaaccaatttgattaccggtttcctcggcagcggcaaaaccaccactatccgccatttgctggctcataagcccgaacatgaacgctgggcggtattggtcaatgaattcggcgagatcggcatcgacggcgcgctgctggcagacagcggcgcggtgctcaaagagatccccggtggctgcatgtgctgcgtcaacggcctgccgatgcaggtgggcttgaatatgctgttgcagcaggccaaaccggatcggctgctgatcgagccgaccgggctcgggcatccgaaacaaatcctgtcgctgctgacccaggagagctatgccggctggatcgatctgcaggccaccctgtgcctgctggatgcccgccagctcagccagccgcgctaccgcgacaacgaaaacttccgcgatcagctggccgcggccgacattattttggccagcaaaagcgatacctaccggccggaagacaggctggcgctggaggcctggaaggcgcaagacccgctgcagcggccctgctacgccatcgcgcaaggcgaagcggatgtcgcgctgttgtcacttcctcgcacaaatcgtacagaattgccggacgcgcagcatcatcatggtcaggcgaaaaagcaggggctggcggcgctgcggctgccggagcacgcccgctggcggcgagcgttgaatgaagggcaaggcttcaccagctgcggctggatttttgacggcgatacccggttcgacaccgtcggcttcatggaatgggtgcgactcgcgccggtcgaacgcgccaaaggcgtggtacgcatccccgaaggcacattgctgatcaatcgtcaggggcaggatctcaacatcgaaacccgcccggtcgcgccgctcgacagccgaattgagcttatccacagcgaaaatgccgactggaacgccctgcaatccgccttgtttaagattcgtttaagttagaccccgtaccgttgccccccggttgccgcagggctgccgggttttatttcgttttcatttttccaacaggttatgtcatgacacgccgcaatttacccctcattctcttcttcaacttactgggcgttgcgctgtttctgtcctggttcctgccggccaatcacggcggctggtttaccctggattcggcgattttcttcttctttaaccgccatctggccaccgacccggcgtttttacacctggtcgccatcaccaacaaccgcgcgttcgatgtgatttcgctgctcgccatggggctgctgtatctgtacttttatctgaagcaggacgccgccggccgccgccgtctggtgatcaccggcgtggtgatgctgctgaccgccgtggtgctgaaccagcttggccacctgctgccggtgaaacatccaagccccaccctgacctttgacaatatccatcgcgtcagcgagctgaccggcatccccaccaaggacgcttccggcgacagcttccccggcgaccacggcatgatgctgattattttttcctgctttatgctgcgctatttcggccgcggcgccttcgccgtcgccctgctgattacgttggtcttctcattgccgcgcgtgatgattggtgcccactggtttaccgatatcgccgtcggctcattgtccgtggtgctggttggcgccagctgggtgctgatgacgccttgcagcgactggatcgtcgatcggttgaatcgcctgttgcccggtaagcaccgccccggccaaccataatttgtgtctatgactcatgccgggaggcttacgcctcccgccctcttcccctcgccgcgcgcaaaaatttccccaccgttcgttaacgcttttgcaacctgatttcacgccagattcatacatcggacaattggcgttttttatatgaagatttacattatgttacatcacaaattcatataaaaaagacgggaaaaaggctcgcaatcccctattggttccggtaatctcagatgcgtttgtgcctggtttaagtcgaatcagtatgaaatccgataaaaatgtgcgttctcgcacgttttcaacggtaactggttgtcgatgcaacaggtgcggactaggctcgtttcgtttggcatttttcaggtagcgactttcgtcgttaaggacttcaagggaaaacaacaacaatggtcaaatctcaaccgtttctgagatattttttgcgggtagtccctgcaattgccgctgcggttatgctgtcagcgtgcagctcgactcacacttcgaacttgaataacgcacaaactgagatgcgtgcagttaatgacaaagacggtcttttactgcaagcctctcaggatgaattcgaagcgatggttcgcaacgttgacgtcaagtcaaagattatggatcagtatgcggattggaaaggcgttcgctaccgcttaggcggtgacaccaagcgcggcatcgattgctcggcgtttgtacagcgcaccttccgcgaacagttcggcatggatttaccgcgttcgacctatgaacaggaagatctcggcaagaaaattcagcgcaccaagctgcgcgccggcgatttggtgctgttccgcgccggttctaccgggcgccatgtcggcatctatttaggcaacgatcagttcgttcacgcctccaccagcagtggggtcatgatttccaagctgaccgataactattggaataaacgttatcgagaagcgcgccgggtgctgaccaacggttaacggcgcaacgccctgaagatcctgaataccaaacgagcgataagcgccgcccacgggcggcgttttttttggttgtcgaacaggtatcatcaaaattgatccctgccttatcgtcacttttccctgcttaacgccgccgcacgccattattttgataaactgttggcaggaaatcgccccgtcgaggaaaaactcgcctattatcgtcagatgacggcaacggcgcccggcgttatttaaaacgtttccgctgatattatgcgcatgatatttctgtcggcgacgccgcatatttaaatggcgccgccggttggtacgggataaaaaggcaaaaatgaaaaaaaagccgttggcacaatccattaactggctgcgcgacacgcctgacgcccggttgcagaggactcggttatgggcttgaaaagagctttcgcccgcagcgtgtctcaccgacaacgcagcctggctaaaagcggtgtcgccgccctggtattttttacgctattcaccgcggtcacgctttctttgatcaaccaccagcgcacgcaatatcaacataaggtcgaagcgcgcacgcaaaagttcacgctgggttatatctcgcatctgacggcggtgatgcggcaaatgatgccgctgctggacaagccttgcctctccagccagtcggatattacctaccaggcggcctttaccagcggcgtgcgcaccttcctgttggtgaaggacggctacgcctattgctcctccgccacgggcgacatgatgttgccgatgaaaaatatctatcaggatatcgactgggatctgcctttggatctcaagctgcagcagggtacgccgatggtgccaaataaaccggcggttgcggtttggctgcgacatcccggcgaaaaggccactggcatcctcgctacgctggacatcgatctgatgccctacctgctgttcacctcgcacgacgaacaggcgccgggcatcgccatcgtgatgggcaaccgcgcgctgaccactttcagcccgaacctgatgccggtcaatcagctaccgaagggcaaggcggataccctgacgctgcccaatctgccgctgaccatcctgttctacaacgagaaactgacccccaacgacattcgcctgacgctgctgggcagcctggtgctgtcattgatgaccggcgtactctgctactacatgctgctgctgcggcaaagcccggaacgcgcgctgctgcgcggcatcaagcgcaacgagttctttatcgaataccagccggtgttccataccgatagcaacagcataggcgggctggaagcgctgatccgctggcagcatccgatcgagggccgcatcccgcccgatgtctttatcccctacgccgaaagcaacgggctgatcgtgccgcttacccgccacctgttcaggctgatcgccgaagatgcgccacagctcgccaaagcgctgccacggggaggtaaagtcggcctcaacatttcccccgcccaccttagcgcaccgtcgtttcaccaggacgtgtatgaactgttgacgcagctgccgggcgattactttacgctggtgtttgaaatcaccgaacgcggcatggtggaagaagagagcgcgctgacggagtttgactggctgcacaaacagggcatcgagatcgcggtggatgattttggcaccgggcacagcgcgcttatttatcttgagcgcttcaccatggattatctgaagattgaccgtggcttcgtcaacaccatcggccaggatacggtcaccgcgccggtgctggatgcggtgatctcgctggcgaaaaagctgaaaatgctgacggtggccgaaggcgtggaaaccgccgagcagatgcagtttctgcaagaacacggcgtcaacttcatgcaggggtactacttcagcaagccgctgagcatcgatgatttcgtcgcttactgcaatgctaatcaggtctttgattatcaggaaaaaaatagttaatctttaagcatctttaccctgcgcccgtccgaagaatgttatgctgggcgcaggttgtactttattccacagcaggagcttactgtctgatgtccgtgcgcattttcgctgctctggtgctctcggcactgagcttcggtctgcgggccgaagccctcaacgaaagctacgctttcgcccttctcggtgaaccgaaatacgccaccgacttcagccattttgactacgtcaatccggcggcgcccaagggcggcgacgtgcgactggcggccatcggcacctacgacaacttcaaccgcttcgctacccgcggcgtgcccggcgagcgcacgatggagctgtacgatacgctgttcaccaactccgacgacgaacccggcagctattacccgctgattgccgaatcggcccgtttcccggccgacatgcgctggatggaattggatatcaacgcccgcgcgcgcttccaggacggcagcccgatcaccgccgccgacgtggcctttaccttcaataaattcatgaccgaaggcgtgccacagtttcgctcctattacaaaggcgtcacggtcaaggccatttcccggttgacggtgcgcatcgagctgcctaaggcgaaccgtgagcaaatcctcagcctgctcagcctgcgcgtattgccggaaagcttctggaaaaaccataagctcaacgaaccgctcagcaccccgccgctcgccagcggtccgtataaaatcggcgattatcgcctcggccagtacatcacctatcagcgggtgcgcgactactgggccgccaatctgccggtaaaccgcggccgctacaacttcgacagcattcgctacgattattatctggacgataaggtatcgctggaagccttcaaggccggcgcctacgatttccgcatcgagccgtcgcccaagagctgggccacccaatatcagggcggcaacttcgcgcgcaactacatcatcaagcaggacgagaccaaccaggcggcgcagaatacccgctggctggcgttcaatctgcaaaaaccgctgttcgccgatcgtcgggtacgggaagcgatcggcctggctttcgattttaactggatgaacaaggcgctgtattacaacgcctatcagcgcgccgacagctatttccaaaacaccgcctacgccgcccgcggctacccggacgccgctgaactggccttgctggcaccgctcaagggccagataccgccggaggtatttaccagtatctaccaaccgcccgcctccgacggtagcggcaacgatcgacaaaacttgctgaaggcgacccaactgctgaaagaagccggttgggtggtcaaaaatcaaaagctggtcaacgccaaaaccggccagccgttcacctttgaactgatgctgctgagcggcagcaacttccagtacgtgctgccgttccgccacaacctgcagcggttgggcatcgagatgcaaatccgcgagattgacgcctcgcagtacacccgccgcatgcgcgagcgcgatttcgacatgatgtcgacggtgtatatggcgatgccgttccccagcgccgatctgcaaattctgtgggattcgcagtacatcgattccagctataacacccccggcgtcaaagatccggcggtcgacagcctggtcaggcaaatcgccgcccatcagggcgacgaaaacgccctgttgccgctcggccgcgcgctggaccgggtgctgacctggaacaactacatgctgccgatgtggtactccagccacgatcgctacgcctattgggacaagttctccacgccgtcggtccgcccggcctatgcgatcggcttcgacaactggtggtacgacgtcaacaaggcggcgcgcttaccggctcagcggcaataaggagtcggaatggcggcctatctgatacgcagactgttactggtgatccccacgctgtgggcgatcatcaccatcaacttttttatcgtgcaaatcgcccccggcggtccggtcgatcaggccatcgccgccattgagctggggcacggcagcgggtttggcaacggcggtgtcggcgaaggcctgggccacgcccggacgggcatcgcggctggcgacggccaatatcgcggttcgcgcggcctggatccggaggtgatcgccgagatcactaagcgttacggcttcgacaaaccgctgcacgagcgctacttcaccatgctgtggaactatatgcgcttcgacttcggcgacagcctgtttcgcggcgcttcggtgatgcagctgatcggccagagcctgccggtctccatcacactgggcctctggagcacgctgatcatctatctggtgtcgatcccgctcggcatccgcaaggccgtccacaacggcagcgcgttcgatacctggagcagcacgctgattatcatcggctacgccattccggcttttctgttcgccattctgatgatcgtgctgttcgccggcggcagctacctggactggttcccgctgcgcggcctggtatcgagcaacttcgacaccctctcatggccggcgaagatcgccgactacctgtggcacatcaccctgccggtgctggcgacggtgatcggcggtttcgccaccctgaccatgctgaccaagaactcattcctcgacgagatccgcaaacagtacgtcaccaccgcccgcgccaaggggctggacgagaaaaaaatcctctaccgccacgtgttccgcaacgccatgctgctggtgatcgccggttttccggccacctttatcagcatgttcttcaccggctcgctgctgattgaagtgatgttctcgctcaacggcctggggctgctgggctacgacgccacgctgcagcgcgactacccggtgatgttcggcacgctgtatatcttcaccctgatcggcctgctgttgaatatcctcagcgatatcacctacaccctggtcgatccgcgcattgacttcgaggcccgccaatgagccgccttagcccgatcaaccaggcgcgctgggcgcgttttcgccgcaaccgccgcggctactggtcgctgtggatctttttggtgctgttcaccctgagcctggccgccgatctgatcgccaacgacaaaccgctgttggtgcgttatgaaggccggttgtacctgccgtttatgattagctacagcgaaaccgccttcggcggcgaactgaataccgaagccgactatcaggatccgttcgtgcagcggcagatcgaacggcacggctgggcggtctgggcaccgatccgcttcagttacgacaccatcaacttcgccaccgaggtgcccttcccttcgccgccttcgcggcacaacctgctgggcaccgacagcaacggcggcgacgtgctggcccgggtgctgtacggttttcgcatttcgatgttgttcggtctggcgctgacgctgttttccagcctgatcggcgtgtgcgtcggcgcgacgcaggggtattacggcgggcgtttcgatctgtgggggcagcgctttatcgaagtgtggtcgggcatgccgacgctgtttctgatcattctgctgtcgagcatcgtccagcccaatttctggtggctgctcggcatcaccatcctgttcggctggatgagcctggtgggcgtggtgcgcgccgaattcctgcgcacccgcaattttgactatatccgcgccgcgcgcgccatgggcgtgccggatcgggtaatcatgtcccgccatatgctgcccaacgccatggtggcgacgctgaccttcctgccgtttatcctctgcggctcgatcaccaccctgacgtcgctcgatttcctcggtttcggtctgccgataggctcgccgtcgctcggcgaattgctgctgcaaggcaaaaacaatctgcaggcgccgtggctcggcatcaccgccttcctggtattggcagtgctgctgtcgttattaatctttatcggcgaagcggtgcgcgacgcctttgaccccagcaaggcgcattgatatggccactcctttgctcgctattcaggatctcagcatcgccttccgtcagggcgacaccgtcacgccggtggtcaacgaactctcgctgcaaatagcgccggcggaaacgctggcgctggtaggggaatccggctccggcaaaagcgtcaccgccctgtcgatactgcgtctgctgcccgcgccgccggtggtttaccctgccggcgatattctgttcaacggcgagtcgttgctgcatgcgccggagactgacctgcgcaaggtgcgcggcaatcagatcgcgatgatctttcaggaaccgatggtgtcgcttaacccactgcacaccatcgagaaacagctggcggaagtgctgatgctgcaccgcggcctgcagcgcgaagccgcgcgcgcagagatcgtcgaatgcctggagcgcgtcggcatccgtcaggccaaaaaacggctgcaggactatccgcaccagctgtccggcggcgaacgccagcgggtaatgatcgccatggcggtgttgacccgcccgaaactgctgatcgccgacgaacccaccaccgcgctcgacgtgactatccaggcgcagatcctgacgctgctgcaagaattgaagcaggagatgggcatggggttgctgttcatcacccataatctgaatatcgtgcgccgcctggcagacaacgtggcggtgatgcgccaggggcgctgcatagagcaaaacggccgcgcgcagctgttcagccggccgcagcatccctacacgcagcagctgctggccgccgaagacgtcggcgaaccgctgccgctacccaccgcgcgccccggcgacgagcggccgctgctcaaggtggaagatctgcaggtgcgcttccctatccggcgcggcctgctgcgccgcacggtggattatcactatgcattgaaatcattgagtttcgagctgcgcgccggggaaagcgtggggctggtgggagaatccggctcgggtaaaagcaccaccgggcttgcgttgttgcgtctgctggcctcgcagcagggcgccatctggttcgacggcgaaccactgcacccgctcacgatgaagcagatgctgccctaccgcagccgaatgcaaatcgtcttccaggatccttattccgccctgaatccgcgcctgaacgtgcagcagatcatcgccgaggggctggaagtgcaccagcggcttagcgccgagcagcgggaacaacgcgtgatcgaggtgttgcgggaagttggcctggatccgcagcttcgccaccgctatcccaccgagttttccggcggccagcgccagcgtatcgccatcgcgcgcgcgctgatcctgcaaccgcagctgttgatcctcgacgagccaacctcttcactggataaatcggtgcaggcgcagatcctgacgctgctgaaatcgctgcagcaacgccaccggttggcttatctgttcatcagccatgacctgcaggtggtgcgttcgctatgtcaccaggtcatcgtactgcgacagggggaagtggttgaacagggagactgccgggcgattttcgcggcgcccgcagccgactatacccgtcaactgctgcagttggcggattagcggcgaattcagaaggggtattgcgcgctgagtggttcggcgatcgcggcaccgacgtttttcaggcggcacatggtggcgctctcgtcgctgcgctgcacgaacaggcaaggttccccttcccattcgacgatcgcacagtcgacctgaatctcctgcagcgacagattgagctgttgcatgacctgccaggcctcggccccttcatggctgagcagcttcagcccaatcaggttgttatcttcgtctattccgttaaacggaatcggttcgaccttcacgccggtgaaaccggatagccaacgataactttgcggcaagcgatgcactaccgaaagttggatactctccacatgaaatccctagtttgaaaaggtgaaacacttttacctgacagggttactaagttatagccgttgactcccgactctgccgcgcacaaatgttatttaaatgtaaattttgccgcaagccattaacctgaccccgtgcttgccgatgccgtgccactttttggcgcgccgtgcggtgttatttcacggcattttgcgactcagctcgcatttttgcgttatatgtaaccctttcccgcagcgatctcaactcttttttcttgcaatgcgactactttttcgtcgccatatttttacaatgaagaaacatcttacccgtcacgttagcgccgccaccgctgctaataccttgatttacatcaatcctaatacaaaccccccgcgcggctcagccgacagcgcgccgcgcctcccggggaatattgggcggcacgacggcggaattttttaacaaaaagcacacaggtgagaaagtggccagttgattagcttgcgtatatttagcaacaaatttttcattgccggttgcaccctgaaatggcagggcgcaaccccgtgacgatgcggagcgacacgccccgaatcgggagaacgtcaggctgcgcgatcgcgcggccggctggcgtaaacatagaacagcaccgccacgatgctgcacagcgccatcgaggtgaccattggccaagcgcttttgcccggcgccatcgacagcaccgcccccaccagcgcaccgatgctgaagcgcaacgtgccggccagggaagaagcggtgcccgccatatgcggaaaatcatccaggatcaccgccatggcgttggaggagatcatcgcgatgcaccccagatagaccgcaacgccgatcaccagcgcccagaagcccaggcccacggtgctcaccgccattagccacagccccatcgccagctgtaccagcagccccagcttgaacatcttgaccgcgccgaaacgccgcacgttgcggctgttgatcagcgtcgtcaggaacaggaagacgatgttcagcgcaaaatagtaaccgaaatgctgcggcgaaacgtggttcagttcgatgtagacgaacggcccggcgctgaggaacgagaacatgcccgcaaacgagaaggcgctggccaacatgtaactcagcacccgcttatggcggaacagcgaaccgaagttgcccagcgtggtgcgcaggtggaaccgctggcgccgctctttcggcagcgtctccttgatgaacaaggccaccagcagcgaaccgatcagcgccgcggcgcccatggtccagaagatggcgtgccagctgaaccacagcagcagcgcaccgccgatcatcggcgccagcagcggcgcaatggtcatcaccagaatgacgaacgacatcatgcgcgagaactcatccttggtgaacatatcgcgcatcagggcgttgatcaccacgctggcggccgccgccgccaaaccgtgcaggaaacgcagcccgatcagttgatcgatcgactgcgccatggcacaggcgcagccggcgatggcgaagatcagcgttccccacaggatcaccggcttgcggccgatgctgtccgacatcggcccatagaacagctgcccgaaggcaaagccgagcatataggcgctgagcgtcatctgcacgctgccggactcgacgccaaactgagcagcgatcaccggcatactgggcaggtacatgtcgatggccaacggcatcagcatggacaacaggcccagaataaaaatcaaaccgagatgagaggttcggttctgttgcacgttccacgactccttaatcggccgcaatcaatgatcggttatcagtcctgcaggtgcggcgcgcccacgctggcgatctcttcttctgtcaatgggcggtattcgcccggagccagatcgtcatccagcacgatggctccgatgcgctcgcggtgcaacgcgatcacccggttgccgacggcggcgaacatccgcttcacctggtggtagcgcccttcgctgatggtcaagcgcaccacgtgctcgtcgacctgctccaacgtcgccggccgcgtcagatctttctcgttgtgcagttgcaccccttcagcgaaacgctgcgcggtgtcttccgccaacgggtgctccaacgtgaccaaataggttttctcgcagtggtggcgcggcgacgtgacacggtgcgaccattgaccgtcgtctgtcatcagcaccagcccggtggtgtcgatatccaaccgcccggcggcgtgcagcttgtacgcgaccggctcatcgaggaaatacagcaccgtcggatgatcgggatcgtcggtagagcagacgtagccctgcggtttgttgagcatgaaatagcgcgggccgttctgctgctgcagcggattgccgtcgaacgccacttcttgctccggggtcagtttgacagccccgctcttcactacctcaccgtccacggtgacgcgtttagcccgaagttcgcgcgcgaccagcgcacggctgatgcctaactgctgagataaaaacttgtccaatcgcatgggatctgctttgcctgtcgttgttatgatcgcattgatcgtattgccaaaatatgacgcccgccgttgcaccgggtgcaaatagcaggttcagggggggaatcgcgtgggggaacagcgattgctgtcacacaagtatagcgacacaacgcgttgcccgacagaggtaattttcacgcttctcgcaccgcgcgtgcgcagaaggcataatagtagaaatttttcggccgcccggggcgtaaaatgtcgctgtttctgtgggaacgggggcgacaagacctgtacccggcggcccattccactctacggcgttcattttatggcctttaccctacgcccctaccaactggaagcggtcgaagccaccatcaaccatttccggcggcgtcccgaaccggcgctgatcgtgctgccgaccggcgccggcaaaagcctggtgatcgccgaactggcgaagcgagcccgtgggcgggtgctggtgttggcgcacgtcaaggaactggtggcgcaaaaccacgccaaatactgcgcctacggcctggaggcggacatcttcgccgccggtctgcaacaaaaagagagcgccggcaaagtggtgttcggcagcgtgcagtcggtggcgcgcaacctgccgctgttcgacggcgccttttcgctgctgatcgtcgatgaatgccaccgcatcagtgacgacgacgacagccagtaccaacaaatcatccagcatttgcagaaaaccaacccgcagctgcggctgctggggttgaccgccacgccctatcgtctgggcaagggctggatttaccagtatcactaccacggttttacccgcggcgacggcgccagcctgtttcgcgactgcatctatgagctgccgctgcgctatatgattaagaacggcttcctggtgccgcctgagcggctggacatgccgattgtacagtacgatttcagccggctggaggccagaagcaacggcctgttcagcgaagcggatctgaaccgcgagctgaagcggcaaaaccgtgtcacgccgcacattatcagccagattgtggagtacgccgacgatcgcaaaggggtaatgatcttcgccgccaccgtcgagcacgcccgcgagatccacggcctgctgccgcacggcgaggccgcgctggtcagcgcagaaacgccgcccgccgagcgcgatgcgctgatcgaggcgttcaaacagcagcagttgcgctatctggtcaacgtagcggtattgaccaccggtttcgacgcgccgcacgtcgatctgatcgcgatcctgcgcccgaccgagtccgtcagcctgtatcagcagatcgtcggccgcgggctgcggctggcgcccggcaaggaggattgtctgatcctcgactatgccggcaacccgcacgatctgtttacgcctgaggtcggcgtcagcaagccgcacggcgacagccagccggtgcaggtgttctgcccggcctgcggcttcgccaatctgttctggggcaagtgcaccgagaacggcgatatcatcgagcactacggccgccgctgtcagggctggctggaagacgacgacggccaccgcgaacagtgcgattaccgcttccggttcaagagctgcccgcactgcggcgcggagaacgacatcgccgcacgccgctgccatcagtgtcaggaggtgctggtcgatcccgatgacatgctgaaggcggcgctgaagctgaaagacgcgctggtgctgcgctgcggcggcatggaactgcagagcggccgcgatgacaagggcgaatggctgaaggccacctattacgacgaggacggcaccagcaccagcgagcgcttccgcctgcagacgccggcgcagcgcaaagcgttcgagatgctgttcctgcgcccgcaccagcgcgcgccgggcgtgccgttcgcctggcacaccgccgccgacgtgctggcgcaacagcaggcgctgcgccatccggatttcgtggtggcgcgcaaacgcggccagttttggcaggtgcgcgagaaagtgttcgattatcaaggccgtttccgccgcgccaatcaattgacctgagcgaacggtccccaatctggacaggttttcgttgccctgcaggcggctttccgttaaaatgccgcgcgctttacctgggcctgcccagcgttaaagcggattcccgaacttgctacttgggtcgcctgtagcagggtaaattttcttttaagagaaaaaacaatgttcactatcaatgcagaagtacgtaaagaccagggtaaaggtgcgagccgccgcctgcgtgcagcaaacaaattcccagctatcgtttacggtggcaaagaagctgcagtttccatcgaattggaccatgattctgttaagaacatggaagctaaaccagaattctacagcgaagcagtaactctggttatcgacggtaaagaaaccaaagttaaggttcaggctgtacagcgtcacccgttcaagccaaaactggctcacatcgacttcgttcgcgtttaatcgctacgttttcgaacctttcgggacgccgaaataaagaacgccgcaattgcggcgttttttattgtctgcgatccggcgcgcttacttgccgctgccggtccggcgctgcagctgatcgcgcaggttcggcggcgtgcctctgatggtcagcgtgtcggtggccgcatcccagaaaatgcgctcgcccaacagcatggcgtcgaaattcaggctgatgccgccgccgctgccggcaaatttggtcagctggcgcagcgtgccgcgatccgccgggaagctttcctccaactcatacccttgctcgctggagaactgcatgaagtctttctcaccgaccggcgacagctcctgcgacagggcctgcagttcaatctcttcgcccgcctgcagctgttcgttgcagtagctgtacacctgttggcgcaccgactggcgctcgttcttgtccaactgcgcatcggcgcagtagtcgtccaccgcctgcagcagcccgcggttttgcgccttggtgtccaacccttcggacgccgccaggaaatccatgaagaagtcggcgaccttgcggcctacgcgcccgcgcaggaaggtcagatagcgggtcgattccgggttggtttcccattcggtcagatcgatgcgcgcgacgatatcggcgttgttgatgtccagatagtgcgtggtgttgatatccagctcttcgttgacgcgcatgctgttacggctgttcagcaccgcgatcagcaagtactccaccgccagataacggtattggccgaacagcaccacgccgccttcggcaaacggatacttcgccagttcgtcgcgcaggcggccggtcgccgcgcggctgaaggccagaaagtccttatcgtccttgcggcaagtgcgcagcgcttccgccagttcgctgccttcgttgaacaggcccaaggccttgctcttggcgctgtagacgcgatgcagttccgtcatcatttcttccaccgccgcgttggtgggaagcaaggtatcacgcaacaccacgtccagcgtttgctcgtcgcgtttcaccaattggtgcagagcgatctggtcgatatccagactcatgataaatcctcctgttctttaggcgcgtattcaaacactgaagaccccgccctgcaatactaaaaagctgtggccaaccggaaaggcgcagcggggccccgccccggcgcgggcgaacaatttcccgaatgacaggaagtgataaaagagcggaaaatcactgccctatacggtaagatagggcactttgcagattactaagcgcaattttatgccacaatcatcccgttacagtgacgaacacgttgaacaactgctctcagagctggtcaatgttctggaaaaacaccatacccccaccgatctttccctgatggtgctgggcaacatggtcactaatttgatcaacaccagcgttgcccccgcgcagcggaaaaccctggcgagatcgttcgcggaagccttgcaggcttctgtccgtgaagataaagcacattaatattgacttatggtgacaaaccgtcagcgttatcgtgaaaaagtctcccagatgatcagctgggggcactggttcgccttattcaacatcctgctcgcccttgggctgggcagccgctacctgtttgtcaccgactggcccgcatccctgctgggccgggtctatgcctttgtcagcctgctggggcatttcagctttatcgtgttcgccggctatttgctggtgatcttcccgctcaccttcgtggtgatgtcgcagcggctgctgcgatttatttccgccgcgttggccaccatcgggctcacgctgttgctggtcgacagcgaagtgttctcccatttccacctgcacctcaatccggtggtgtgggatctggtggtcaacccggatcaaagcgagctttcgcgcgactggcagctgatgtttatctgcgtgccggtgatcttcctggtggagatgctgttcggcacctggagctggcagaagctgcgcagcctgaaccgccgccgcttcggcaagccgctggcggcgctgtttatcagcgcctttttcgcgtcgcacctgatttatatctgggccgacgccaacttctatcgcccgatcaccatgcagcgagccaacctgccgctctcgtacccgatgaccgcgcgcaagttcctcgagaaacacggcctgctcgaccagcaagagtatgagcgccgtctggtgcaacagggcaacccggaagcggtgtcggtagagtatccgctcagcgatctcagctacggcgataaaggcagcgactataacctgctgatgatcgtagtggacggcattcgcgccaaagacgtggcgcaggacatgccaaccctgacccgcttcgcccaggaaaacgtgcgtttcagcgatcactacagttcgggcaaccatgccgataccgggctgttcggcctgttctacggcatttccccgacctatctggacagcgtgctcgccggccgtaagccgtcggcactgatcaatgcgctcggcgatcggggctaccagctggggctgttctcctccgatggcttcaatgccagcctgtaccgccaggctctgttgaccgacttctcgctgccaacgccggcgccgcaaagcgacgcccagaccacccagcaatggcaacgttggttggcggaccagggtagcaaagagccgtggttctcctatatcaacttcagcggcgccgagccgaccgaaggcgacaaaaaaccggttcctgccgactttattcggcgctaccgcaccggcgcgcaagatgtggatgcccagataggccaggtgctggacacgctgaaacagcgcggcctgctggataaaaccgtggtggtgatcaccgccgagcacggcgtcgagttcaacgacagcggcaaaggccaatggggcgccggcaccgccttcaaccaggcgcaactgcaggtgccgttggtgatccactggccgggcaccccggcgcagaccatcagcaagctgaccggccataacgacgtcatgcgcaccttgatgcaacgcctgctgcacgtgcaaaccgcgccgaaagactattcgcaaggcgaggatctgttcaccgcccagcgccgcaacaactggatcgccaccggcgatggcaaccagctggtgatcaccacgccgacacaaacgctgatgctggacaacagcggcaactatcgcgtctacgatcagaacggcgatgaaataaaagacgagaaaccgcagcttgctctgctgttgcaggtgttgaccgatgtaaaacgctttatcgccaactaactgcttaaaactaaagcaatcaagtggcgaggcgcttgcattaacatcgggaatcggtagtatgatttttcatagcgtcggcatgtagcgcagcctggtagcgcaccgtcatggggtgtcgggggtcggaggttcgaatcctctcatgccgaccaaattcaagaaaacctgctgttacagcaggttttttttcgtctgcacgtcgagaggatgagaatctccgcaggaggtttgagccgagcgcagacagggtgcgaagcccctccgtagcataatgagtgcgaattcccttttgttaattttaagcctccctttaaggcggttgcctaacttaattcattcattttggcacgcgcgccgaagcaaatgataaatatgagtacaatgcctaccagctgcggccaaattgcgccacaaaggaagtcgtcccctatatgcttgctgagatcgaggcatgtgtaagtcgtagccccagagaaccaagcttttatccaaaaagttttcttcatgggatgtccctattccaaaacattttaatatgtcacataacagagtaagcagtcattaatataaacattgattcgattgtggaaaagagctaattataaagagccttacgaaggcttacatagtatcaatcaaataatcaaaaggagttgtttatgaaagttattgattcttcaatgctaaatttcgtttctggcgcagggaattttgcggataaccgtagcagtaacggcaaggtcaacaataataatgggggctgtagtgcttcaactaactatggtggccaggctaatggttttgttagcaactcttcagccggcatgagcagggattgtgctatagcactaggattggcagcggcaggtggcgttatcggcggacttatatcgcaaggcgccagggctgttattggtggtgtagtgggatcttcgattggctcccttggagcatgcattggtggaagcaacaacaatggttctcaaaacgcctctaaaggcggaggttataacgggggcacctgctcctggtaattacacacgaaatactaacagtgcttataaaaagcttgcatggtgttttttgaaaggaggaaaggaaatgaagaatccatttgttgtttttgcttttgtttttataatgatttcattatcgcaaagtgtttttcacactctgggaataacaagttacaacgggattttaaatatcagcttacctaaagatttcgctctgagcattgtaattatttctgttccaatagggatttttgcaatcatgtatgggatctattcatctgttaaatggtttgctaaaacgtggaataaatctggagggtaacagattactccctatgcgatagcggaggataaaacctcccctatcgctggtttattattttttaatccaacctaatcactctatctgccgacgctatcgtagtttcacggtgcgcaatgatgatccgcgtaatttttagttttttgatcgcctgattcaccttcgcttcactgtccttgtccagcgcactggtcgcctcatccaggaacaaaatcgccggtttcttgtaaatggctcgggcaataaacaggcgttgcttctgcccgccggacaacccttcccccagttcgccgatcagggtttcgtaccccatcggcatgcgcatgatcacctcatgcagatagctggcgcgggcacaggtttccatccaggcatcatccatctcgtccgcgaacccgcagatattttcccggatcgagccggagaacagcttgtcgtcctgcatcacgcaggcgatcatcttgtggtagttgttgatgccgagctgccgaatatcgacgccgttcacctcgaccttccctgaatccgggggaaacagcccgcacagcaccttcatcagcgtggtcttgcctgccccggatgggcccacgatggccacgctttctcccggtgcaacgttgatatccaaggcatcaaagaccgccggtgactggctgtcgtatcggtagctcagggcatgggtggataaccccattggttgcattttcgagatatatgggagctcgggcttgcgatcttcccgtggatgcagggcgatatcggcaatgcgttcgttgtgcaggctcatcatgcgcaactgcagcaaaaattccgtcagcgaccctatgcggtcggagaactggccccgaaaggcgccgaacgccacgaacataccgagggtcatctgattatcgatcaccagacgggtccccagccacagtatgacgacctggtcacaggccgccacgaaggtgttgatcccgccaaacagcatgtccattttggtgatccggataccggtattgatggtgtcgatttcaagattgagccagtgggcgatacgacgctccgccatgccctgcatcttgacggtggcgataccgtacagcgtctccataaaataggaaccggcgcgggcatttctcaccagcgcttcttcggacagctggcgataatacccgtaggtcaacaggcgcatcagcacatagagcgcggtgaacgcgatcaccacccaggtcaaccagcccccatacagcaccatcatcaccagcacgccaatcaccataatgccgtccatgatggcgccgacaatactggtggtgaaggtgctgcgcagcgtatccagtgagccgaagcgcgactgaatgtcacccagcttacgccgttcaaagtagccgagcggcaggcgcagcaggtgggtaaacaggccggattgccactgcacgttgatgagcgtcgacatgaccagcccggcccaggcgcgcaccatgccaatggcggcccgcagcaggatgaacagcattagcccaacgcagatgagcgtcagcaacccgcgatccccggcgggaatagcgtgatccatcaccagctgcgtgccgatgggcatcaccaggttgatggtttcgaacaccagagacaggcaaaagattttgccaagcgcccccttgagaccatgtacgctgccaatcagcgtacgcaggtgaatgcggtggcgaacactatcggcggtaaaggcgctgccgggccaggcctcaagtgctacgccggtgaaactgtgcgacagctccgccaggctgaccgcccgccgcccgcgcgccggatcgtgcagcaccgcgtggtgacctttgacgctaaccagcaccacgaaatggttgaactcccagtgcagaatgcagggcagtttcagcgcgccaagttcgtccagatccagcgacaaggggcgggtgctcaaccccagctattcggcgataccgatcagcccaaccagcgttgcaccgcgggttgacagattgaactgccggcgcagcgcgatcaggtcgatgtttttgccgtaataaccgcagatcatcgccaaacaggccagcccacattccgacgactcggtctggtgcaccatcggaacccggtggcgcagccgcagatccagctggctgacccgttgtttgaatgttggcttattcattgaccggccccgttgcgctgtgtttcatgtcgtagaacggcgacaacatccattgataaaccggccttttctccagaaacagagtgctttgcgctttcatgccgttttccaggctcagacgcttaccgtcataggcaatggcctgtttttccggaatgacgatcaccttgtagtaaggcacagcggcggtcagcgccgctttgggcgccccctgataggtcagcatttcctgcggtgaggccggggctttggaaatgacggataccgtaccggcaaactggccgaacttctccgccggaaaggcgtcataacgcatattgacccgatcaccggcagcaatgtaagggatggcgtcgttaggtacccacagcaccagagcatagcgatcgatgtcgtgggggagtacctgcagcagactgtcgccgacgttcaccatcttgccaaccgtgacgctcagcgaatcgatgcggccgccggccagcgcgcgaacgataatatcgccagtggcatcgatgttttgccgctccttttgcagctcgtagcgctgcagctccatctggtagatctggttgtcaaattcagcggcctgggtctggatctggctttccagcgcggtgatctgcagcgcattctgttcgttctggccggaaagccccagcaggttgttctgctgctggtaatacagcgcgacctggttggtgagctgatccttgttgatcagccccttggtctgatagtgccgatagttctccatgttctccttcatgatgcgtatcccttcctgggcacgctggaggatatcggtggagcgggtaaatgcggcggtatattgcgccttctgtttttccaacatagtcagcgtggcctgcttgctgctttccagccggctgatgatttgcgcaatgcgcgccagctgggcatcgatatcccgctgctggttatcgctgaccactccgctgcgggtgcttttgctgacgtcaatctggtaaatggccgccccggcggcgatccgttgcccttcggtgacaaattgtttgatcactaccccttgaaccgtggagtaaacgttcgcggcacggggataggtgctgatctcaccggtcacgttgacccgccgggtataggtaccggcgatcacgaaggtgagaaaagcaatgagaaaaaacaggcacagccccgcggtgaaccaaacgggaataccgggcaacagcaatgcccggccgcgccatttcaatttctggttaccgatcgcttcctggcgaaacaccgtttttcttccttaaagaaaataaggggcgttggcttttgccctattatgtcgttaacaattcgctaaatatcaggcttgctgttaatcagcgctcgatacatagttgaatgtgatatcgcaaataacctcgtcagtttactgagcgaatcttgcccgtttttatgcgcaggggctaactgtttttattttttccagatatttcttgctccccatcaaattgtctcggcgtcaaaattcctgttaccgtgccttcatggggatgcagttgcatccagtaaaactcaatccctgcaaaggcttactcctattttttgagggcaaagccaaatagcaaaccatggcaccggagaactaaagtctcatcgaaagagttaattcattgaacacctttatacttaaccaaataatacttcgcgatagttattcatcattaatttaaacttgacccgtccaataaaaagcgttaatcataaaaagccttacaaaggtttgtgcaagataaacttagaaatcaaaaggagttgcttatgaaagttattgatttttcaatgctgaattatattgttggtggccgcggcaataatggcggtgaccgtgttgacaatggtggcagaactagcaacgggaaaagtgggggaagtaacaatagcaacagtaactattactcaaaacaaggtgatgccataaccaattgtaataacggcattatcggtgggatgattgcaggatcgctcggaggagtaccgggtctcgctgttgggcttgtcggcggcgcaatagctggcggttgcttcaataatcaaggttccaatggggggcagagtagcaatgcaggcagtaaaaacaattgcaacaactcaataggcggttcttgtaaggtttgactttaccttcaagagcataacattacaatatcagacaggactaaaacggtgacaaggattatcagttcattaattgtctttttatccatcctggccggttctttttttctgagtggcgccggggtaataggttaccaaccgtggttttctgcacccgagaatttgtcaaaacttgtgattatcgttgtcacctactgctcctttgtttacgccgcattaagtatttatagaaaacttaaaaaataaaccccataaaaaaaatccataacacaggcatgacgttcagttttgggttaaagaatagaattaactataaattaaccctcaataattcagtttttcgtctgccgtttacgcggaaagtttgacgatcgccgccggaataccctgacgcaccgccgcaccggtcacccaatccagccaggtattcggcacttcgcgcgtcggatcggcaaaccccagatcgttgaggttgatgccggcggcgatgcgctcatccatcgccagcggttcgccatccaggtagtgctggctggcccccatctcccggtggccgtagccgtgttcccccgcgatcacgccgggcatcccccccgccagcaaactgatctgcgcctcgcggctgccgcccggcgtgctgatgcgcacccaatcaccgtgttgaataccgaaacgcgccccgtccgccgggttcaaggccaccaggttcaccggcttcacgtcgtgcaggcgccggatcaccgcggtggagctgctcatcacattcgatttgaaggacatcaggcgcagcggccactgccgttctgggtagagcgcttccaccgcgcggccgtccgacaaacgcgccgggtagcaggtggggcagccgctgaaacgctcgccggtgatcgcatgccggtgcttcgccacttccgcattccagatctgcagcggtttctcccagcggttgcccacgctgccgtcgcggcggccgctgtcgtgatcggcgaagcggccgccgcggctgtagataaacgccacgcggtcgatctcatcggcgcgcagcgtctgcgccagctgcggcagcaagcgatcgacaccgctcagcgccagttcgtccgccctcgcggccggcaccggcgccttgccggcaaacgccacgttggcggcggcgcgcagataataatcctccgcacggttgagcggcagcagcccgccctggccgtcgccgatagcgcgatcgccgaaccccggcaatgccaggcgtttggcgatggcaatgcaaaacgcctccatggaaatcggctgcccttgcgccgtttgcgcagtcgccggcgtcactatcggccagcgcgcggtggtggtcttactggcgacgccgccccagggggcgctgaatccccaactctcaaaattatgggtgtccgggacgatatagtcggccagcgccgtcgtttcgttgataaacgcatcgatagcgataaacagcggcaaacgcgccggatctttcagccgctcctccgccacgccgcgcaacccggcgataccgtacaaggggttggtcatgttcgagatccaggctttcagcccgtacgggtaccctgccagcgccgaggtcagcagctcggtcaactgcccggcgacgaacggataccagggcgctttggccggccagggcgaaatgcccgccgctactttttcgcggtattcgtcggaggtttcataggcggccttgctgcgcgcgatattcagccctttcggttttaccaggccaggaaactcgaccaggttatagcgcggcccctcggcgaagccgttgaatttaccgccgccgacgaacacgccccccgccaggctcaggttgccgatcagcacgttaagcatcatcaccgcccaggtattgtaaaacccgttcgccgccatcatcccgccatgggcgatcactgccgccttgcgcccgtgggcggtaaaggcctcggccagtgccgcgatgcgtgccaccggcacaccgcattgccggctgtacgcctccggcgacagcttgtcggcggcctctttcaaacactggaagccgcttttcacctccacctgcgcgccatcgtacagcgtcaccgtacgggttacccacagctcggcgctgtcgcacgtctcggccgccaccagctcacccgcgccgttgaccaccagcggtgacgccgacccggtgccgttgagatcggccagcgtcaggtgctgccccgcgcgcggatgctcgctctcggcgatcaccagatgcgtggcattggtccagctcttctcgccggcgcgttgcatggcggcctcagacgggatggcgagataatcggtctgataacgccggtggtcgaggatccaacggatcatcgccatcgccagcgccgagtcggtacccggcaatatcgggacccaatggccatgatcgtccgccaacgtggtggtcagcggcagcgccggcgccaccaccgcataacggaattcgctgcgcaatctggcgctggccaattgccgggcctggcgcttgaacgggttgccggactgcgccggtgaggtccccataaacagcgcgaattcgacctgttcccagtccggtttcacgtgcgggttcttgtccagatcgttcatcaacgcgccggaaccggcacggtaggccagcccgcagtaagcgccgtgcgcgccgaagtttttgctgccgaaactgttctgggcgaagcgccgcaggaagctatcgcgcccgtcgtcaccggcgttggtcaccaatagctggttggctttcggccccagccccggccgtcgggcatcgatcggcgtctccagatcgcggatcgcccgcagaccgtccacatgcccctcgccgaacagattgccgccctccaccacttcggcgatcaactgctcaaagctgatgcgctgccacttgccctcgccgcgtttgccgacgcgcttcatcggctccagcacgcgcatcgggctgtaaagcccctccagcagcgtggcgccgcgtgcgcaggcggtggaacgggcatcgaggccgcgttcgccacccaactgcgccaacgcatcctgcagcggcaacgcagagtcgacgtgccgttcctgagacagcggatgataagggttgccagcaatgcgcaatacccggtcggtctgcctgtccacccgtacccgcacgccgcattgcgtccagcagccgaaacactgggtcatcgagatggcctgttgcggattgccttgccattccggcattgcccgcccttcgggcgacagggagttgccgttgatgcgatccagagtcacccgccctgaggtgccgtgaatcaagccgtcgatcgcccgtttggcgacttcgcgatagctcaggccgaaagcggacaatccgccgaaggccaggcccactttcaaccactgacgccgggtgagtttagccatgttgttttctccgcagtaaaaacgcctgtgcttcacgcaccatgatcattaacgccagccacaagccgaaggtgccgacgatcgccagcaaaccgtcagtgccgagcggcaggctataagaggagttagacgcgctgtatttcgggatggtttgtacctcgatcaacagcgtccagcgcatcagccagctcagcaccagagcaccggccaccagcagcggcgcaccggcgcgcggcaagcgccgatagccggcccaggcggcgcacgccagcgtcagcccccacagcgcaatccatcctgcggcatactggcgcgccatcgcctgcgtctgcagccagtggcgtaccgccgcgccggataacgtatcgccgcatacccacagcaggatcgccccgccgagcagcagcagtgtcagcaacatcccgcgcgccagcggcgcctgctgaccgggccgttcgcgcatcgccagcagcagcaaagccaagagcgcctgcagcgcgctgaggaacatcacgatcggaaacccgtagctgaaccagattgggcgggcgcgcacgatggaaacctctcgcccggtgtacaacagcaggccgatagccaccagcgcgcaggcgggcgctatcccacgcaacagcgcaaccggtctgcccgtcagccgcgtaaattcaatcgcgataaaccacaggccgatcagcagggtaaacagcggcaagaacagcgcgccccacggcatccacgaccagggcgtcgggtaggcgtagaaatgccagaaacgggcggtttgatgcaggtcggcggtcaacgccagcggcgcggtaatggcgcacgtcagcccgataaacagcgccatgcgctccagatgcgcggcgttatctccaccgcgccagcgccacacgcaggccagcagcgcggcgcaggcggcgatgccgataaagaagaaatattgtacggcccacggcagccagctcaccgcctgcggctggctcagcacttctgcgatcatcagttggcggctcatcgtctttctccccataaggcgacctgcgcccgccccggcagcggcgtgacgaaggcgtcatccagccccagatagaacacgtggggcgcggtttggttctccggcttgaggacttttatctcgacctcgtggcgccgcagcagcttgctcagcgtgctgtgcggatcgcgcatatcgccgatgatccgcgcccctcccacgcacgactccacgcatgccggcaacaatcccgcctccagccggtgcacgcaaaaggtgcatttgtccgccgtttgggttgtgtgattgataaaacgggcatcgtacggacaggcctgtacgcaataggcgcaacccacgcagcgtttgttgtcgaccaccacgatcccgtcctcgcgctggaaggtggcctgtaccggacataccggcacgcagggcgggttgtcgcagtgattgcacagcctgggcaacagcacgttggtcgcagcggcttcgccttcgaggctgacctgatactggtttaccgtggtacgaaactccccgtgcggcgtctggttttcaatggcgcagctcacggtacaagcctggcaccctacgcagcgccgcaggtcgatcagcatcgcgtaacggcggctcgcatccccctcgcgccgcgtcggtgctaacgtcagcccggcctccgccacggagatcagcgaagcccccgccgtcaacacgcccagccgctgtaaaaactgccgtttaccgaaatccatgcgcctctcccacgtcctgggcatcaccccgatcacgctattgatgcccgttagatgaataaacaatgtcgatgatttacagtgtaaaaatgacattgggctcagctctattgtggttaaccacataccggacctaacgttgatctaaaacaagtgacggcaggcagattgcccatcaggaggggccgtgagggtcgtgttattactgctgctcagtctcggctgggggatggcggcacaggcgggcgagtggtcgatcggcgtgctggcgatgcgcggcgatgcggcgaccgcgcgtgactggcagccgctgatcgacaggctcaacggcagcgtcggcggtgagcgcttccgcctgcagccgctcgatctggcgcagatgcgcgaagcggtcaatcggggcagcgtgcagttcgtggtcactaatccggcgcagttcgtgcagttgaacagccactatcatctgcgctggctggcgtcgttgcgcgccgccaacggcgatcgggcaacgggcaacatcatcggcagcgtgattttggtgcggcgcgacagcggcataacgacgccgcaggcgctgatgggcaaaacggtgggcgccatcgctccgcaggccttcggcggctatctgaccggctataaggcgctcagcgatgccggtatgcggcccgagcgcgattttcacctgcgctttaccgggttccctgccgacgccctgctctatctgttgcgcgagcgcgccattcaggccgctatcgttcccgtctgtctgctggagaaaatgggtcgggaaggcttgatcaacccggcggattttcgcccgctgttgcaacggcccacatcggttccctgcgtcaccagcacgccgctttatcccaactggtcgttcgccgccctgcccggtctggataactcactggtggatgcagtagcaagagccttgctgaccgcaccgccgcagtctccctttcagtggggcgcaccggcctcgaccagcgcagtggaagcgctgctgcgcgccgtcaatcagcacccggaacagcggcgcctgtggctggatatcaagagctggctgatccagcatcagacggccgtcagcctgtcgctggcggtgctggcgctgttgatcgtcaaccatatctggatcgcgctgctggtgcgccggcgtgggcgacagctgctccatgccggagaacaactgcgccgtcaggagcaggcgctggagaacgccaggcagttgaacgtgctgggagagatggcctccggctttgcgcatgagctcaaccagccgctggcagccattcgccactatgcgcaagggtgcctgatccaactgcgcaaaacggacgccgggcacccgctgctgacgccgctggaaaatattgatcggcaggcgcagcgcggcggcgagacgattcataacctgcgccagtgggtgcagccccccaccgagaaggtagacaaggcgagctggcgccccatctcgataaacgaaaccgccgagcgggtgtgggcactgctgcgcctgacgcaacgctaccccgacctgaaactgttcaacaacgtgtcaccttcgctgacgctaaccctgccgccggcgctgctggaacagctgctggcgaacctgctgctgaacgcggcgcaggccggcgccaacgccgtctggctttccgccgacgaacacgaacgggcgctcgatgtgcgtttgcaggacaacgcgggcgggatgagcgcggccgggctggagcaggctttccgccccttcaacaccaccaaggccggcggcatggggctggggttggccatttgccgccgcctggcccggtatggcggcggcgagatccaactggctaaccgccccgcccccgacagccgcaatgggctatgcgtcaccctgcatttcatatttaacgatgaggaaaaccatgccgctaattcatctggtggatgatgacgtcgccgtcaccgacgcctgccattttttactgaccagcctcggccacgacgtgcaatgctggaatgacagcaccgactttttggcgcaggccgatctgtttcagaccgggatcgtcttgctggacatgcggatgccgaaactcgatgggcaccaggcctacgctgaactgcgccgcctcggcagcacgctggcggtggtgttcctgtccggccatggcgacgtgccgatggcggtggagcagatgaagtacggcgcggtggacttcctgcaaaaaccgatcgccgctgaaccgctgatcgccgccctcgaacgggcgcggcaggtctcggccaaagcctggcgacgccatgaaacttgtggccgctaccgcacgctcacgccgaaagaacgcgacatcgcgcagctggtggtgcgaggcatgatgaacagggaaatggcggagcggttgaatatcgccctgcgcaccgtagaggttcaccgggcgaaagtgatggagaaaatgcaagccgccagcctggcggaattagtggttcagttgcaggggttaccgcacgccgcgcaagaatgatcgcatcatgcaaaattccgcgccccctcttgccaaccggccttcctcaggccagaatactgtacattaattcagtatttacaggtgagtcatgtttgtagaattggtgtacgacaaacgcaacgtcgctgggctgcccaacgccgccgagattattcgcaacgagctggaaaaacgcgtgcatgcgctgttcccggaagctgacgtgcgcgtgaaaccgatgcaggccaacggcctgaactccgacgccagtaaaagcgatcgtgagaagctgaaccgaatgttggaagagatgttcgaagaagcggatcagtggctggtcactgatatataaacccaacctgatggctgggctcctcaaccggctattttaccgccagaatacagcaaacgctcagcccttgattaatgggcttgacgcggtgcctcccccatccggttatcggttggttagtgtgcacttttccagcgcatatataccataacaaaaagccccagcatcgctgctggggcctctgtcatggtgccggctaccggaatcgaactggtgacctactgattacaagtcagttgctctacctactgagctaagccggctgaatttggcggaaggacagagattcgaactctgggagctgttacactcgacggttttcaagaccgttgccttaaaccactcggccatccttccaatgggcgctgatattagcgataccgttatgaaatgtctatcattttgatgcaaaaaaatggcatgggcggtgcagttgcctaaacttcaggccttaaacgcttaaaaaatgaaaagccccgcaaaagcgaggcttttatgttcggctgaaacgcgattacttcggctgcgaatcgtagtcggaacaggtttgatagcccttgttcatgacatggcccgtgtcgttgtagctgacaaagtacgtttgcactttgccatcgcgcggcgcgacagcataggtatcgcaagtgccttgcgcatgaatcagcgtggcagacgtcgacggcggaccggcaatcgcccgcacctgctgcttggtcatccctactttgacatcgctgaccaccggctcattgacataactggttgcacggtcataggcggtgcagccggcaagaatggaaaataccgctgcagtaccgacggccaaaaccaacttcttcgtcatagcttgtcctcttggagtacgtttgttgtcccctaagtctagaagtggaaaggcttttctacaaattcccgtttgtcgatcggtgcggtttacgctcgtcgatcagcgtttgacgttttcctgtcgtttcagctgctcttcaaacccctgctgtgactcctgcacgtaacgctgcagccctgcgggatcgataaatgcctgcgtatcgccggcctgcaaacgccgccatttgtcggctaaagcgaaacgcgtccctttattggcgataaatatatccgcctgcacccgtgccaaacgggcgaaactgccgcgaatgtcctcaatcagctgcggatagtttttgttgccgatcaggtagtaatccggtgtagccaggctgtcagcatagataaagcgatacggcttgccgttatgccgtagcgtggtcaaccacgacgtcgcgcccggcagatgccccggcgtcatcatcgcggtcagcgtcaggccgccaagggtgatgctgtcgccatcggcaaccacaatatccgtttgcacggccgggaaagtgagcgtatcccccaacgcgaaatcctgccgtccacctaacgccaactggcgcgcattggccgcgctggccaccagcctcgcgccgctccagcgtttcagctgcgcaatgccgccggcctgatcgagccttgcatggctgttcaggatatatttcagatccttaatgctgaaccccagccgttcgatattcgctttgatgcccggcgcactgctctccaaccccgcatcgatcaaaatcaatccctgcggcgtgctcaacaataccgacgacaggttgctcgtgccgacgtaatacacctgctcaaagatctggaacggcgctatcggctgcgcccactcttcaaacagcgagtatggcggagcgctagacaacggctgcgccgggtctaacttcgcctgcgtggagaagctcaaggaaaaggccatcgccatcagataatgcatgctttttttcatttttctcttctgtctgtgtcaaccgggcaggagtatactcggccttatattgaacagtattcaattaaaaaaaggacaattgatgaatattctacaaatggacatgaatctgctgaaagtgctgtatctgctgatggtaacgggttccagccgtaaaaccgccgagcggctgggcatcagcacctccgccgtcagtcatgcgctggctcgcctgcgggaagtgttggatgacccgctgtttcgccgagaaggccatcgccaggttcccaccctgtttgcactgtcgttgaaagacaaattggcgccgctgttctcctcgctggacagtgaaatgttcggccaacaaccgcaggcgccgcgtcgcttcacgctggtggcgccccccgctctgcaccctattctgttgcctttgctggcggaaaagggcgccgcttgccatgccgatattcactgccaaaactttgaacgacgcgcctggcgcgaagagctgcttgaggggagcgtcgatctggtgctggcggtgggcgatcatcaacaacgcaccagcgcactgcattatgaagcgcttgggcgcactcgcctgattgcgctgtatggcccgccgctatacccagtcctgcaagataaacgcgcgctggccttcagcgaactggcggattacgcgcattattattgccatccgtggccacaaacggaaaacgagctggatcggcagcttgagcgccaggggttgcaccgccgcattgccctgaactgcgccgactacgcacaacttccaccggtgctgcgccgcgcgccgttgctggcggtagtgcctcaaccatggtttaccgcccagcccgacaagcacgggttaagcgcgctgccgattagcgataacctggctatcggtcaccttttttctcaataccgaaaaggcgagccggagtggcgaaagcggctgatttccgccatccacgccgagctgcgacactactaccgctaagtaggatcagaaaccgaaatcgctcagcgccgggacatcgtccgggcgccgaccgagcggccaatgaaaacgccgatcctgttcgcgaatcggcatgtcgttgatgcaggcatggcggttaatcatcaatccatcctgattaaactcccagttttcattgccaaagctgcgataccagttgccggaatcatcgcgccactcataggcgaaacgcaccgcgatgcgcgcgccgtcaaacgcccacagttccttaatcagccgatactccagctctttcgcccacttgcgttgcaaaaatgcgaccaccgccgcgcggccgtcgacaaactctgcgcgattacgccaatgggtatcgagagaatagacctgtgacacccgctcaggatcgcggctgttccaggcatcctccgccaaccgcactttttcgctggccgattcacgggtgaaaggcggcaaagggggtttaatgctcatgatcatctcctgcgtaataatgtagacaactctgtctacattattacgctagcgcatgtagacagagttgtctacaatcactcgaaaatagcctgggagaaaatgatgaccgccgatcgcaataccttacccgcccgccagcgcatcctgttgacggcccacgatctgttttatcaggaagggatccgcgccaccggcatcgatcgcatcatcaaggaatcaggcgtcactaaggtgacgttttatcgccactttcccagcaagaacgatttgattacggcgtttttggcctatcgccaccagcagtggctcacctggttcagcacagcactggatcgccatgtggcacaaaccggcgggttgctgccggcgctggcgccctgcctggcggaatggttcgacgatccgcgctttcgcggctgcgcgtttatcaatacggcggtggaaatcgccgatctgctgccggaaagcctgcaaatcgccggccggcataaacggcaaatggcggatgaactggcgcgtcacctgcccgccggcccacagcgggaacagcgggcggcaatgctggcgatgctgatcgacggcgccatcgtcagagtgcagatagagcggcaaccgcaggccgcgctgcaggtgctgaatgccgcgttggacatgttggcgcaaggcgggttcgatcagtaattggcccaaatgcccggcgtcaccagttccaacagatgggcgtcgggatcgcgaaaataaatgctctccccgccgtgttcccagcgcatccgcccctcaatctccacgccgttggccaccagatgccgttcccagtgcggcaactgctctttcgccaccgccagcccgatatgcgccggccccacgccatcgtgcgcaggaataaacccggtcgggtagtgcgccccgcgcagcgaatcaccttcgataaacaacaacagtacgctccgatcgccgacgttgtaggcgcgaaaccgttcgttggcgaccatcgtcggcagcttcagcacctcctggtaaaacgcgtccgcgcgttcaatatcgctgacgtacagcaccgtttctatcaccctgtcgatcttgagttccataatagcctccgctctgttttccgttctgacagcgtaggtcgaacggaggcgagccaaagcgcttcccgagccgacaacggatcaatccgtgctttttaccagcaaaaaaaacgcggcccgaaggccgcgctgtgtgattcacacgctggtgcttagaactggtaaaccaggcccacggcaaccacgttgtcggtgttgatgccggcagcgtcggtgaagtcgttgttgtccatcaggttgattttgtaatcaacataggtagacatgtttttgttgaagaagtaggtcgcacccaggtcgacgaatttgaccaggtcttgatcgccgtagtccttgccgttgccggcgcggcccaggtctttacctttggtctggttatagccgacgaacggacgcagaccgaagtcgaactggtagtgcgcataggcttcgaagctctgcgccttgttggcgtagccgtaagcaccatcatccttggcagagctgccgaaacgcgccgcgttgtaggactgggtgaacatcaccgccaggtagacgtcgttggcgtcatatttcagaccgccggagtagccttccgccttatcgccgcggcccatgatgttctggtgaccgttaccgccgttctgctcgctggtgcggcgagagttgaagaaggcgcccgcggcgctgatgccgtagcccatgtcatagctcatggacatgccgtagccttcgccgttttggcccagaacgtcacgaccattgttggtctcttcgccgttgccgtttttaccctggtactgcagggcgaagttcaggccgtcaaccagaccgaagaaatcattgttacggtaggtcgccaggccgctggaacgctggaacatgaactggtcggcgccgtaggtcataccgtcgaactcaggctgcaagtcggtatacgccgcgacgtcgtacagcacgccggtgttacggccgtagtcgaaggagccgtagtcgccgaatttcagaccggcgaagccgtaacgggtgaagttcttgttgtcctggctttcagcgtggttcaggttcgcctgatattcccactggccgtaaccggtcagctgatcgctgatttgcgtttcgccgcgcaggccaaaacgcatataagactgatcgccgtccacgccgttgttgctggagaaatagtgaagcccgtttactttaccgtacaaatccagtttattaccgtctttgttgtagatttccgccgcgcctgctgtgcctgcaaccagcagtgcgggtaccatcagagagagtactcgaagtttcatcgttattatcctcgttaattatgtcgagctacggccactgcccttttcgagcattattagcacgactgtgcattaccattctggtaacaagggttatattaatccagaaagaaaatgataccaagtatccgatagtgtttcattgtaattaataaaggtttcaaaatgtaaatacgcgcgaactttcacaaaacattacagacaaacaaaataaagcacttaaagataaaaaatagactaactgataaaaaatcatgtagttatacatatctttaagaaaaaaaagccaaccatacaattgagcgagacaataagcacattgtgccaaaacgcgaaccacgcgcagccgctataatcacctcgctatcatcattattttcattattaccttcattatccgaagataatttctgcattcctttaaccggcttctggccggttttttattttcctccctactctcctcacaatttcagcccgtacaaatagcacgcaaataaataacccaatgatatagtttcattaatttactttcgcactaattgctaatctttttccttattttagcctacaaattgaacttgcttttcatttcgtgctttatctcatcgattatttcccgccgcaggcacaattagccgcagagattcagttctggtaatctgaaaaaagcgcaccttcagcgagtaaaattcatgatgccctttcaacccgacgtgctgtggcggcggctgcaaagttcccccttccgcgctcgcttccgtttaaatgccaaggaccagacttatctcgagggtaagggattgccgctgatcctcagccatgcccgcgattttatcgaccgccgcctggccgccgcccatcctaaaaacgacggcaagcaaaccccgatgcgtggccacccggtgttcgtcgcccagcacgccactgccacctgctgccgaggctgtctggaaaagtggcacggcataccgcagggcgtcgcactggacgaacagcaaaaggactatattgtccaggctatcgcgctgtggctggtgcgcagaggcggtgccagggatgtgtccggcacgaatattttcgacccggatcgcggattgtgataaaaactgtcagtaactttcaccattcttttgacccaagatcctgacgcttacatgacagccaccttgtgcaatgaacagcaaacgcccggcgttcctcaacagatcgccacccgtctggcctttttcgtcgccggtctcggcatggccgcctgggcgccgctggtccccttcgccaaagcgcgcatcggtatcgatgacggctcgctcggcctgttgctgctctgtatcggcgccggctccatgttggcgatgccgctgaccggtttcctgaccggcaaactgggttgccgtgcggtgatcctgatggccgggctcgggttgtgcatcgatctgccgctgttggcgctgatggactccctcggcggcatggccgcggcgctgctgctgttcggcgcggcgatcggcatgatcgacgtagcgatgaacgtgcaggcggtgatcgtcgaacgcgccagcggcaaggcgatgatgtccggttttcacggtttcttcagcatcggcggcattgccggcgccggcggcgtcagcgcgctgctgtggctggggctgacgccgctgcaatccaccctgctcaccgtgctggcggtgatcgcgctgctgacgctagccagccgccatctgctgcgtgagagcggtgccgatgacggcgggccgatgttcgtcttgccgcgcggttgggtgatgttcatcggcattttgtgctttatcatgtttttggcggaaggatcgatgctcgactggagcgcgctgtttctcaccacattgcgcggcgtcgaacacagccaggccggtctgggctatgcgctattttccatcaccatgacgctcggccggctcaatggcgatcgggtggtgaactcgctgggccgctaccgggtgctgctgctgggcagcctgtgtgccgctctcggcctgagcctggccatcgccttcaatcacgctaccgtttcgctggtcggtttcatgctggttggtctgggcgcctcgaacgtcgtgccgatcctgttcagcgccgcaggcaaccagcgcgacatgccggccaacttggcgatcgcctccgtcaccaccgtcggctatgccggtattctggccggcccggcgctgatcggctttgtcgctcagttttccagcctgacggtggccttcgcttgcgtagccgctctgctgttggcggtggccgccagcgccagggccgtcactcgctgattcaggaatgcgcagccactatgcaaaataaacaattgaccataagctccagcaacattacccgctgcttcctgctgtttatcgtgctgctgacgatcggcatcggcctgtatggctacaactacaccaacgcctggctggcggaaaagaagtacacgctgaacagcatcgccggttcgctgcaaaagcgtatcgatgcctaccgctatatgacctatcaggtctatgacaaattcggcaatgcgccggcgcagaatgtcgatcccggtttgcaggaaacccgcctgcggcccgatgtctattatgtcgagaaaccgcacaagaaaaccgacgcggtgatcttcggcagccatgacgaaaacacgctggcgatgatcgccaacatctcggactacctggacacccgctggggcgccaagaccgagaactacgccatgtattacctcaatggtcaggacaatagcctcagcctgatcaccacccagccgctcaaagagctggcttcgcgctttcgggaaagctacctgaccacctcggcggacgaacgccgcgccgagatgctgcaacaggccaatatgctcgacgaacgcgagagcttttccgacctgcgcaagcagcgcttccagaacgcctattcgttctcgattcgcaccactttcaatcagccggggcatctggcgacggtgatcgccttcgatttgccaatcaacgacatcattccggccaatctggcccgcgccaatttcctgctgctgccggacgatgtcgatctcgacgatagcgccatcccggcggaaaccgtcctcggtacccatgcgacgatgagcggcggctgggtggagttcagcgccgctctgcccaatgcgccgctgaaggtgatgtatcgcgtttcggccatcaatctggccatcgatctgctgcgcaacaacatttggctgatcgcagtcaacttgctgctgctggcgctgtcgatgctgagcatctactttatccgccgccagtacattcgcccgagcgaaaacatggcggtagagctggaggccgagcgcgcgctgaatcaggagatcgtctccagcctgccctccggcctgctggtctacagcttcgccaacaatacggtgatcgccagcaacaaaatcgccgagcacctgctgccgcacctcagcctgcaaaagatcgcccatatggccgaacagcatcacggtgtgatccaggcgacggtcaacaacgaggtgtatgaaatccgcattttccgcagccagctgtcgccggacacctacctgttcctgatgcacgatcaggataaagaggtgatggtgaacaagcggctgcagcaggcgcggcgcgaatacgacaagaacgtgcaggcgcgcaaactgatgttgcacaacctgggcatcgaactgaatcagccggtgcgccagatgcacgatctggtcgaccgtctgcacagccggccggatgaggaacaacagcaggcgctgctgggccagctgacggcggcgtcggcttcggtgctggagttgatcgataacatcaccctgctgacccggctggaaacccaggactggcaacccacgcgcgaaccgttcaacccgacggcgatgatcgacgagttgctgcttgaggccctgcctgcccttaatcagaaggggctggcgctgttcaagcatttccagctggacgtcgagcagaactatatcggcgacgccaacgcgctgcgcaaggtgatctcgctgctggtgcattacgccattatcaccaccgcctgcggcaaggtttctctggttatcgaccatgagcccgaacacccggatcgcctgattttccaaatcaacgacaccggctccggcatctccaacgaagagatcagcaaccttaactatccgttcctcagccagacgctggtggatcgcttcaaccacggttccggcctcactttcttcctgtgcaatcagctgtgcaagaagcttaacggccagttggacattcgcagcaaggtggatatcggcactcgctacaccatccgcgtcgccatggagatggagaaaaaagagccgcaggagcaggaaaagctgctcgacggcgtcaccgccctgctggacatcacgtcagatgaagtgcgcggcatcgtgacccgtctgctgcaggcctatggcgccgactgcctcgtcgccgaagatcgcgcggtcaaccgcgactatgacgtgctgctgaccgataacccgcagcgcgccgatgattacaccctgttgctggcgaccgatgagccgggctggcaagcgctggataaacgctacattcgggtgaactataatctgaacggcgcattaatcgacgccgtgctgatgctgatcgaacagcaaatggccgcgctggaacaggaagaaagcccgctttcattgagctcagaagatatccaactctatgaaaaacaattgaaatcaagtgattactatgggctgtttgtcgatacagtacccgacgatgtcaaaaaactgtatactgaggcgggcagcagtgatttcaatgcgctgtcacaaaccgcacaccgcctgaaaggcgtgtttgccatgttaaatctgcttcccggcaagcagctgtgcgaatcgttagaacagcgcatcgcagaaggtgatgcgcccgagatcgagaataacatcagtcagattgattttttcgtcagcagactgctgaagcaaggtagccaacaacatgaataacctgaacgtaattattgctgatgaccatcctatcgtactgtttggcatccggaagtcacttgagcaaattgaatgggtgaatgtcgttggggagttcgaagactcaaccgcactgatcaacaatctgtccaagctggacgccaacgtgctgatcaccgatctgtcgatgccgggtgacaaatatggcgacggcatcacgctgattaaatacatcaagcgtcattatccgcagttgtcgatcatcgtgctgaccatgaacaacaacccggcgatcctgagcgcggtactggatctggatatcgaaggcatcgtgctgaaacaaggcgcgccgaccgatctgcctaaggcgctggccgccctgcaaaaaggcaagaagttcacgccggaaagcgtctccaaactgctggagaagatcagcgccagcggctatggcgacaaacgcctgtcgccgaaagagagcgaagtgctgcgtctgttcgccgaaggtttcctggtgaccgaaatcgccaagaaactcaaccgcagcatcaaaaccatcagcagccagaagaaatcggcgatgatgaagctgggcgtcgagaacgacatcgccctgctcaactacctctcgtccgtcagcatgacgccgttggacaaagactaaagcccgcctcacggcaggttaacgccaaacaggcacggcatccgccgtgcctgtttgcttttcaggcctcgctgcggttgtagcgtacctgctggctgtaataagccaatgtctgctccagcgtctccagcgtaaccggcttcgacaggcaattatccatgcccgcctcgagacagcgctgcttctcttccgccaacgcgttcgccgtcacgccgatcaccggcgcgctgaactgcatctcccgcagcgcctgcgtcaggcgatagccgtccatgttcggcatattgacgtcggtcaacacaatatcaacgtggtgctgtttcagtacggcgagcgcgtctacgccgtcgttggcggtcaccacctgataccccagcgaccccagctgatcggaaagcaggcgacggttgatcggatgatcgtcaaccaccagcagatagatatcgccgttgtccgccgcactggccttggcgggcaccggcagctgtaccagcgcctctgccgcgccgttgccgacgccgaacaaccggttgattaaggtcagcgtttcacgcggcgtagaggtgctgtgcatccaatagcctggccgggtttccagcgacgggccgatatgttcggtcgagaactggatctgagccaacagcggcgtgttcagcatcagcgggtaatcgctgagcatcacctcgccggcggcggtatcctgcccgtcatagcgctggatatcggcgccgtagccgcccagaatcgccatcaggtaactttccaggcgctgattgcggatatccagccacagccgccggccctgccaggtatcgctggcctgcgggatcgggaactgggcgttaaacaatggaatgcgaatgctgaacaagctgcccagccccggttcggactcgacggagacgtcgccgtccatcaggttgaccaacttctcgcagatcgccagccccaaaccggttccctggaagtggcgctgcacgccggttcccacctggaagaacggatcgaacaggcgcgagatttccttctccgggataccgacgccggtatcgcgcacgctgaactccaggtaactgccgcgggtgcagacctgcagcacaatacagccggtatcggtgaacttgatggcgttgttcaccaggttggacagcacctgctgcagccgcaccggatcgccgaaaatgcgctccggcacgttctgttcgataaagcagtacagccccagacgtttcttcaccaccagcggcaaatagttgccggcgatatgggtgatcacctccaggcaggagaactcgcgcggttcgatcttcagctgctcggactcgattttggagaaatcgagaatatcgctgatgattttcagcagcaggccggaagagttattcatcgcgttgaccagccgatcgaccccttgcggcagcgccttggtctgcagcaaatcgaggttgccgataatgccgtacagcggcgtgcgcaactcatggctgacggtggccaggaacatcgatttggactggctggcctgctccgccgccgccgccatctcctgcagcgactcttccatcttcacgcgcgcgctgacgtccaccagtacgcagatcgccacttcttcgttgcggtagcgcgagtggacaaagctgatctgcaggttgttattgttgctggtcatcacatcgacgaaattcgcctgctgttcgcaaatgatgcgcgtaatgcgatcgcgatcttcgtgggtcaacaggttgatgtagttgtgcgccagttcgttactcaggatattggtgccgtcgctgatacgcaggatgcagatgcccaccggtgccgaggcgacaatcttgcggttgaactgctcgtgttcttccagacggaaggcgttctcctccgccggcaagaacatcttgcgctcaaacagccacgccagcgtgaacagcacgatagccgataacaggttcagcaacagcgcgttgaggatcagcatcttgaagcgttccaccacgcttttcaccggcagcgcataaacgatgctcagcgatgaaggcggcagcgcttttttcaggatcagatcgcggtagttgtcgacataaccgaagtaagcatgctcttcggggtagctgttgagcgcagcggcatagcgatcgccatccgccaggcgcagtatcggatcgttgttttcatccagcagcgtgacgccgatcggcaggttgccggcggtgacgaaatcttccagccggacagtttgctcgatgcccagcagcgcctccagcttgttgccgatatagagaggcgtcagcacatacagataaccgatatcaggccgctgcgcgctggggctaatccaatacaggttgttgtctttgtccagattcttggcgttgcggtatttcagaatgcgctcgtgcagcaacttcagcatgttttcccggttggcgaccgcgttgccgccgccgaattccgccagacacaggctgtcgccgccgatgaagaacacccggttgagatcgtaggccgccacgaagttctctttccaatactggatcaggccgctcagcgaatcgagtgaactgcggtaagtggcgctcagggcgcagttagactccggatacagcgggtagaattgcggtgggctgcccttgccggggatcacgccgctgaacatgtccatgccgctgaccgaaccgttgaggcggttttccgccatgtacttgatgtcgcgtatgatgtcggcagaatggcggatatagccctgcgcctgatcgaaattgaggttgtactcctggcggatgtccgattctttctgatgcaggatattcagaatataaaaggtggtgagcagcgcccccaacgaccacagcaaaatcgccagcacccggaacaaatagcgggatattttcagcgtagttcgaaaagaggctaagtatttcaatcggataccatacgaaagtcagtgacggcgcgcgttgtcgccggcgcggcggccggcggctcggtgcgccaattaaaccatataactgaaaaagggcctagcatcgctgccaggcccttttgtctcagtgcattacggtgtcggcatgccgacgccctcaccttgcttaaacgttgtcgtcgtccatcggctcagccgcgtcgtcgccatcgtccagcggcgtgctgtcttcttccaccgcttccgcgcccggttccaggctgtccagctcttcgtcttccaccggttcggccacgcgctgcagaccgacgacgttttcgtcttccgccgtgcggatcagcgtcacgccctgggtgttacgaccgaccacgctgacttccgaaacgcgggtacgcaccagcgtgccggcatcggtgatcatcatgatctgatcgctggtttccacctgcaccgcgccgaccacctggccgttacgctcgctcaccttgatggagataaccccctgggtggcgcgtgacttggtcggatactcggtcaccgcggtgcgtttaccgaagccgttttgcgtcacggtcaggatgtcgccctcgccgcgcggcacgatcagtgagatcacgctgtcgccttcgccgaggttgatgccgcgcacgccggtcgcggtacggcccatcgaacgcacctgcgtttccgggaagcgcacgactttaccgttggcggagaacagcatcacttcgttgctgccgtcggtcagatcgacgccgatcagctcgtcgccctcgttgaggttgacggcgatgatgccggcgctgcgcggacggctgaactcggtcagcgcagttttcttcacggtaccgctggcggtggccatgaacacgtggcgcccttcttcatactcgcgcaccggcagaatggcggtgatacgctcgtcggcttccagcggcagcaggttgacgattgggcgaccgcgcgcgccgcggctggcttcaggcagttggtacaccttcatccagtacaggcggccacggctggagaagcacaggatcgtatcatgggtgttggccaccagcaggcgatcgataaagtcttcttctttaatacgcgcggcggacttgcctttgccgccgcggcgctgcgcttcatagtcggacagcggctgatacttcacgtagccctggtgagacagggtcaccaccacgtcttcctggttgatcaggtcttcgatgttgatgtcggaagtattggcggtgatctcggtgcggcggccgtcgttgtacagctctttgaccgccaccagctcttcgcggatcacttccatcaggcgctctgggctttccagaataaagatcagctcggcgataaagttgagcagctctttatattcgtccagcagcttttcgtgctccaggccggtcagtttctgcaggcgcagatccagaatagcctgagcctgctgctcggtcaggtagtatttgccgtcgcggatgccgaactccggctccagccactcagggcgagcggcgtcgtcaccggcgcgttccagcatggcgctgacgttgcccagatcccacggctgagccaccagcgcgactttcgcttccgccggcgtcggcgcacggcgaatcagctcgatgatcggatcgatgttagccaacgcgatagccagcgcttccaggatatgggcgcggtcacgggccttgcgcagttcgaagatggtgcggcgggtgaccacttcgcggcggtggcgcacgaaggcttcgaggatatctttcaggttcagcagcttaggctgcccctgatgcagcgcgaccatgttgatgccgaaggtgacctgcagctgcgtcagcgcatacaggttgttcagcaccacttcgccgaccgcgtcgcgtttgacttcgatcacgatgcgcatgccgtctttatcggactcgtcacgcagcgcgctgatgccttctacgcgtttttctttcaccagctcggcgatcttctcgatcagacgcgccttgttcacctgatacgggatttcgtgaacgatgatggtttcgcgcccggtcttggcgtcggcttccacttccgcgcgcgcgcgcaggtagactttgccgcgcccggtgcggtaggcctcttcaatgccgcggcggccgttgatgatcgccgccgtcgggaagtccggccccgggatgtgttccatcagcccttcgatgctgatgttttcatcgtcgatataggccaggcagccgttgacgacttccgccaggttgtgcggcggaatattggtggccatgcccacggcgatgcccgacgagccgttgaccagcaggttcgggatcttggtcggcatgacggccgggatctgctcggtgccatcatagttaggcacgaagtcgacggtttctttttccagatccgccaacagttcgtgagcaatcttggacatgcgcacttcggtataacgcatcgccgccgcggagtcgccgtcgacggaaccgaagttaccctggccgtccaccagcatgtagcgcagtgaaaacggctgagccatacgcacgatagtgtcgtaaaccgcgctgtcaccgtgcgggtgatatttaccgatcacgtccccgacgacacgggccgatttcttgtatggtttattccagtcgttacccaatacgctcatcgcgtacagaacgcggcggtgaaccggcttcagtccatcacgaacatctggcagcgcacgtccgacaataacggacatcgcatagtccagatacgagtttttcaactcgtcttcgatgtttaccggtgtgatttctctggcaaggtcgctcatggagctgctatccctctactaatgattcatctgcccgctgccatagtggcaaaggtgtaaaactatatcacaaagcacgctttacgggaaaataaccgccgctgtttcacggaaattgtgcagataagtgcgctaaaaacgcatcggcacagacgatgccgcgccggaacatgtataatccgcgcaacgagaacaaggagccagacaagcccatgaacgcagaatcatccagccgagtgcaaaacgttgaccaccaggaaatcgccaagttcgaggccgtcgcctcccgctggtgggatctggaaggcgagttcaaaccgctgcaccgcatcaacccgctgcgcctgaactacatcatgcagcgcgccggcggcatttttgacaagcaggtgctcgacgtgggctgcggcggcggcattctggcggagagcatggcgcgcgaaggcgccaaggtaaccgggctggacatgggcgcggagccgctgcaggtcgcccggctgcacgcgctggaaagcggcatggacgtcacctatgtgcaggagacggtggaaagccacgctcaggccaacccgcagcgctacgacgtggtcacctgcatggagatgctggagcacgtgcccgatccggcctcggtggtgcgcgcctgcgcccaactggtgaaaccgggcggccacgtgttcttttccaccatcaaccgcaacaccaaagcctggctgatggcggtgatcggcgcggagtacgtgctgaagatggtgccgcagggcacccacgatcataagaagtttattcgcccttccgaactgatcggctgggtcgacggcacgccgctgcgcgaaaagcacatgatcggcctgcattacaacccgatcaccgatcatttcaagcttgggcgcaacgttgacgtgaactacatggtgcacacccagcacgaaggctgagcgctgtaaaccgcgccggccctgcgttatcggggttcggcgccaacgcgctgttaggaaaaatacctaatttccgcgacttcgatcaaaatcgtggttgtagacagttttttagaatattaaatcagatcaatatgccgtttttttctaacgtttaataaagcgccaaacgatcggttttttcagtttttcagtaaaatctgatctcgcttattgacaagcttgtcgcgccagtcacggcgcgcactgcgaacggcaagttacatttcacccccaagttatccacaaattaggccggttttgttcacttgcaaacgccgttttttctcactatcttgttacctcaccgacatacaacccctatatatagtgtttacatactgagcagagcgactacacttctgcttaggggcaccatacggacaggtaaaacaccacatgaaccaaagtctgcttgtaactaaacgcgatggccgtaaagagcgcatcaacctcgacaaaatccaccgggtcatcgattgggccgcagaaggattgcacaacgtctcggtttctcaagtagagttgcgttcccacattcagttttatgacggcatcaaaaccgccgatattcacgaaaccatcatcaaagccgctgccgatctgatctcccgcgatgcgccggactatcagtacctggccgctcgcctggcgatcttccacctgcgcaaaaaggcttacggccaattcgagccgccgaagctgcacgctcacgtgacgcgcatggtcgagatgggcaaatacgataaacatctgctggaagactacagcgctgaagagttcgagcagatggactcctttatcgatcactggcgcgacatgaacttctcttatgccgccgtcaagcagctggaaggcaagtatctggtgcagaaccgcgtcagcggcgagatctacgaaagcgcccagttcctgtacatgctggtgtccgcgtgcctgttctccaactacccgcgtgaaactcgcctggactacgtcaaacgtttctacgacgcgatttccaccttcaagatttcgctgcctacgccgatcatgtccggcgtgcgcaccccaacccgccagttcagctcctgcgtgctgatcgagtgcggcgacagcctggactccatcaacgccacctccagcgccattgtgaaatacgtttcgcaacgcgccggcatcggcatcaacgccggccgcatccgcgcgctgggcagcccgatccgtggcggggaagctttccataccggctgcattccgttctacaaacacttccagaccgccgtcaaatcctgctcgcagggcggcgtgcgcggtggcgcggcaacgctgttctacccgatgtggcacctggaagtggaaagcctgctggtgctgaaaaacaaccgcggcgttgaaggcaaccgcgtgcgccacatggactacggcgtgcagttgaaccgtctgatgtaccagcgcctgatcaaaggcgaagacatcaccttgttcagcccgtccgacgtgccggggctgtatgacgcattcttcgccgatcaggacgaattcgagcgcctgtacacccagtacgagaaagacgacagcattcgccagaagcgcgtgaaagcggttgagctgttctcgctgatgatgcaagaacgcgcttctaccggccgcatctacatccagaacgtcgaccactgcaacacccacagcccgttcgatccgcagatcgcgccggtgcgtcagtccaacctgtgcctggaaatcgccctgccgaccaagccgctggaagacgtcaacgacgagaacggcgaaattgcgctgtgcaccctgtccgccttcaacctgggtgcgatcgacagcctggacgatctggaagagctggcgaccctggcggtgcgttcactcgacgccctgctggattatcaggattatccgatcaaggccgcgcaccgtggcgcgatggggcgtcgcaccctgggcattggcgtgatcaacttcgcctattacctggcgaagaacggcgtgcgctactccgatggcagcgccaacaacctgacccacaaaacgttcgaagccattcagtactacctgctgaaagcctccaatcgcctggctcaggaacaaggcgcttgcccgtggttcaaagaaaccacctattcgcagggtatcctgccgatcgacacctacaagaaagacctggatgcgatctgcaacgaaccgctgcactacgactgggaaaccctgcgtaaagagatccaggaaaccggtctgcgcaactcgacgctgtccgccctgatgccgtcggaaacctcttcgcagatttccaacgccaccaacggcatcgagccgccgcgcggccacatcagtatcaaggcgtcgaaagacggcatcctgcgccaggtggtgccggagtatgagcgtctgaaagacaactacgagctgctgtgggaaatgccgagcaacgacggctatctgcagctggtggggctgatgcagaaattcatcgaccagtcgatttcggccaacaccaactacgatccgacccgcttcccgggcggcaaggtgccgatgaagcagctgttgaaagacctgctcaccacctacaagttcggcgtgaaaacgctgtactaccaaaacacccgcgacggcgcggaagacgcccaggaagatttgcagcctgccaaggccggcgatgacgactgcgaaagcggcgcctgcaagatctaaagtttgacctagcgggccggaattttccggccccttcatttagccacgttacgatggattcaggcttatggcttacaccactttttctcagaccaaaaacgaccagctgcaagagccgatgttcttcggccaatcggtaaacgttgcgcgtttcgaccagcaaaagcatgaaatcttcgaaaaactgatcgaaaaacagctctccttcttctggcgcccggaagaggttgacgtctctcgcgatcgcatcgattatcaggcgctgccggagcacgagaagcacatcttcatcagcaacctgaagtatcagaccctgctggactccattcagggccgcagcccgaacgtcgccctgctgccgctgatctcgatccctgaactggaaacctgggtggaaacctggtcgttctccgagaccatccactcccgttcctacacccacatcatccgcaacatcgtcaacgatccggcgctggtgttcgacgacatcgtcaccaacgaagagatcaagaagcgcgcgaaagacatttccggctactacgacgatctgatcgagatgaccagctactatcacctgctgggtgaaggcacccaccaggtgaacggtaaaactgtcaccgtcaatctgcgtgcgctgaagaagcagctgtacctgtgcctgatgagcgtgaacgcgctggaagcgatccgcttctacgtcagctttgcctgctccttcgcgttcgccgagcgcgaattgatggaaggcaacgccaagatcatcaagctgatcgcccgcgacgaagcgctgcacctgaccggcacccagcacatgctgaacctgatgcgttccggtgcggacgatcctgaaatggcggagatcgccgaggagtgccagcaagagtgctacgatctgttcgtgctggccgctcagcaggagaaagagtgggcggaatacctgttccgcgacggctcgatgattggcctgaacaaagacatcctgtgccagtatgtggaatacatcaccaatatccgcatgcaggcggtcggcctcggtctgccgttcgaaacccgctccaacccgatcccgtggatcaacgcctggttggtgtccgacaacgtgcaggtagcgccgcaggaagtggaagtgagctcctacctggttggccagatcgactcggagatcaacgccgacgacctgagtgacttcgaactgtaagcgatggcgacgccaaccgtaacgctgcgcgccgccggcacgcagctctcttgccccaacagtgaaaactgcctgctcgacgtgctggagctgcacgacgtgcaggtggagtaccaatgccgctccggttattgcggcgcctgccgcctgaagctggtgaaaggcgaagtggcctaccgccaacagccgctggcgtttatcaacgccggcgagatcctgccctgctgctgcatgccgctgacggatatcgagctggaaatgtaaagtcgggtgccggaaaccgcgcctggagaccagaaggcggggttgcccccgccctatgattaccgcttcacctcacacgccaacctgatcaggatagtgatattttcctggtagattttcagctcgcacagcgagtctcttatcatccagataaataacaaaaccgtaatacatacaacggttagcgagtgaaacacatgccttaagcgcatgcttgcctccttgctgtgaaggggctaccataccggtgtctaggcggtatgtgcagccccattctgattgagagtcagtctggggctttcatctatccgccttgtcacacaatgcccaagacgaacagtctcaagcacccgtcaagagagtaaccgcattccctcaccgcgaatatcccctataagattatgattaatcagggatatataactatcctcaaagtatttcgcttagcgcccctttcccgccgatgtggaaaaataacgcgccggggaatcgccgaaggctttacgaaacatggcgataaaattgctcggcgaggcataccccagcgcctccgcaatctgcagcaccgtttcgccttcggccagcttcgccaacgcatatgacaaccgggcctgctggcgccactgggcaaaactcaaccccgtctcgccgatcatcagccgccgcagggtacgcggcgacatcgccccccattcagcccacgcctccagtgaacgttcgctccccggttgcgccagcaaggcctgcagaacgccggccaggcgcggatgggacgacatcggtaaatacagcggctccgtcggcgcctgacgtatctcatcccgcatcacctgcgccatacgatcctgctccagggtaagcgcgcagcgtttatcccagccttccgcacgctgagccagcgcctgcagcacggcgctgatgccgataacgcaaggtgtattcgacagctcgtggcaggcctccggcgccagcagcaaactccagccgctcagcgcgccgcagacctgtacccggtgctccgtcgccggcgggatccaacccgcccgctgaggcggcagcacccaatcgccctgcgccgtgcgtacatgcaacaagccgctttcgacgcacagcaactgcccgcgcacatgctgatgccagtcgtattctcgcgtgcccaaccgatactcccggcctgccgcatcgcggccgccaagcgcgataagccaggggcccgccgaccattcgctgcagtcagcgtcgagggcatgaaggtttgcatccatattggccactaatcactatttttagtccagataccgttataccaaccttttcctgcgccgacataatgaaatgcttccggccgctaccgtctgtggccactgtttcacgagggaacatgatgacaacactcagcattggcattatcggtgcagggcccggcggcctgtgtctggctcagggactgcgccgcttcggcatccacgccacggtatttgaacgcgacgccacaccgcaggcgcgcgatcagggctaccggctgcgcatcgatccgtcgggccagcaggcgctggccgcctgcctgccgccggcacactaccggttgctctgcgccggcagcgcgcaaaacagcggcgagagcaatctatgggatccgcagcttgccccgctcaccagccgacgccccgagcactggttgccctccagccagcgccaaacgcaagaaccgagcggcgatctcggcattcatcgccaaacgctgcgcgagatcctgcttgccggcctgcaagaccaggtgcgcttcggccataccttgcgtgaatttgcacaaacgccgcagggcgtggaactgcagttcgccaacggcgagcaagtgcgggtcgatgtgctgatcgccgccgacggcgtcaactcgctggtgcggcggcgctgcctgcccgaggcggggcccgaagacagcggcgcggtcaccctttacggtaaaacgccgctcgatgcggcgacccgggcccaattggcccccgagctgctgaacggcgtatcggtgatcttcgccgacggcgtgtcgctggtggttgaaccgatgcgctttcaggcccccatggcgcagctggcggccgactacgcacccgattgccgcctctcaccggtcgacgactatctctattgggcctgtatcggatcggctgggcgtctcggcgggccggtgcgaactgagggaaccgctgcgctgcaggcgcgcgtacggcatatctcgcagggatgggcgcccgccttgcaaacggcgttagcgctggcggatcccctgtcgctcagcgtgcggacggtgcaggttacggcggcgataccagaatggcacagcgaacgcatcgcctttctcggcgacgccgtgcacgccatgagcccggcgggtgggctcggcgccaacaccgcgctggtagacgccgccagcctggcggcgcatctggcgcactcagacagcgccgcgcaggcgctcaggaactacggtacagagctgcaaacgcgaggcgccgcggcaatacgtctttcacgcctggcgtccgaacggctgatgcagcgcgatgaagccgacaagacgggagactcagcaacgccaatacccgtcactcgataatttccaccacctccagccaggcgtttttaccgcacgcctggctcccattcagccaacggcgcagcatatccagcgccagcatcgccaccgactcctgccgcagccgcaggccgtggcgcgacgcgcgataacgcacggtctggccaatgccgccgcgcggcgtgtgcagcgcaatgctgacctgctcatcgcgcatggcgctgaccgccaacgccaacggtgcaccggtcaattccgccagcgagcgggcgcgcgccagcgtcgtttccagcgtttcgatgcagtgcgccggcagcagctcgccacccgccagcggcgccccttcgctctgcagctgcagattgatcaaaccgccgctgaactgctcgctcaacgccagcttcagcccttgctgattcagacgctgcgtcagcgtcgccggcaacccgtcggtgccttcaaagatgcagttgtcccccgccacttcgcgcacgcgtcgccaggccagctccatctccgcacgccggctttccggcccggtcagcttcagttcgatgatcgggctggaggaacggtaacccaacaccacgtccggcggcagcggcaggctgtccagctcggcggccagatcgctctcggaggtgccgaaggtcgtcaggcgcaggcacagcggcggcgccggcaaggtgaagcgctggcgcagacgcggcacgatctgctgttcgaccatcactttgaattccgacggcacgccgggggtgaagaacatcaggcattggttcagctgcagcgcgaacccgcaggcggtgcctaccgggttatccagcatttccgcgttggccgggatctgcgcctgcttgcggttggaaggggccatcggccgcccgcgctcggcgaaataggcttccatgcgcgccaaccagtcagcccgttcgaccagctctacgccgctggctttcgcggcggccagcgcgctgagatcgtcgctggtcggccccaggccgccgttgacgatcaacacatcggcgaggtggctgcgttcctgcaggatctcgatcaacgcagagaggctgtccccgaccgtttcacgcccgctcatcggcaccccctgcaggaacaggtagtccgccagccaggcggcgttggtatcaataatttgcccgtgcagcacctcatcgccggtgctgagcatctccacccttaacattgatctctcccacattttttggtcattccactatagaagcccgtaaataacttttcactagccgcctgcggataatttcagccatgggttcgtttctcatgtgccatgccggtcgccactatgtaaacatttgtgtacatcatgcgtaacgtcggtttgacacaaattagggcttccactatcctgccatcctcataaatcgttacctataattttcaaaatctttcggctggtagagaaaaaacgtgaagaatcgcactcttggcagtgtttttatcgtggcgggcaccaccattggcgccgggatgctggcgatgccgctggcggcggccggcgtcggcttcggcgtcacgctggccttactggtcgggctgtggctgttgatgtgttacaccgcgctgctgctggtagaggtttaccagcatgagcaggcggataccggtctgggtaccctcgccaaacgttatctcggcggcggcggccagtggctgaccagcttcagcatgatgttcctgatgtacgccctcaccgccgcctacattagcggcgccggcgaactgctcgccaccagcatcagccaatggacatcgcaggacttcccggtgtcgctcggcgttctgttgttcaccctggtggccggtggcgtagtgtgcatcggcacccactcggtcgacttgttcaaccgcatcctgttcagcgccaaagtggtatttctggtggtgatgctcggcctgatgttgccgaatatccaccaaaccaacctgatgacgttgccgctggagcaaggcctggcgctgtcggctattccggtgatcttcacctccttcggcttccacggcagcgtgccgagcatcgtcaactacatgggcggcaacattcgcaaactgcgctgggtgtttatcatcggcagcgccatcccgctgatggcctatatcttctggcagctggcgacgctgggcagcatcagctccgacaccttcgtcggcattctggcgcagcaggccgggctgaacggcctgttgcaggcggtgcgcgacgcggtggcttcgccgcacgttgaactggcggtgcacctgttcgccgatctggcgctggcgacctcgttcctcggcgtggcgctcgggctgttcgatttcctggccgacctgttcaagcggcaagataacgtgcgcggccgcctgcaaaccggcgccatcaccttcctgccgccgctggccttcgcgctgttctacccgcgtggtttcgtgctggcgttgggattcgccgccatcgccctgtcggtgctggcgctgctgctgccttcactgctggtgtggaagacgcgtcaaaagcatcaggcgcagtatcgcgtctggggcggcacccctgcgctggcgctggtgtttgtctgcggggtaacggtgatcgccatccaactgggcatcgccagcggcatgctgccggcggtcgggtaagcgacgaaagacaagaaatgataaagagaaaggggccgcaatggcccctttttgctgagcgtcagaagctcagccctacgccgacataagggccatcggccagggtgttgtcgcgacgcccgtctttgccttccatctgcatgtaacggtagcccacgtccacgctcagcggacggaacttccagcgcaggccgccgctggcttcgttataggccttcacgccgctggtgaaagactcaggggcaaagtaaccttcgccgtgcaggctgaagtaacggttaatctcccactccaggccgccgcccagcgccaccgccccgccgctcttcccgtctttcgggctgaggtacagcgctttggcgcccacggtcgccgtcaacggccccagcggcacgccgaagttcaaccccacgctgccgacgttgccgtcgtggtcgctgcgcgcccagttgccggtcaggcccagacctgaagagccggtgctcatgccaacgcccaggttggtgtagtgctgcccggcttcgcccgacacgctgatggcgttcgccgcgccggtcaccaacagcaatcctgccgcgcacgcgacccaagtctttttcatcatctttccctctggtttgtcatccgtatcgaatgttcgaatcaacgcataataataacgtcacgagtctataccaaagcgcaatgcgtatttaagggataaaagcgaaaaaattcttcaataatcaaataaatgtaaatatttgcaaacaataatctatattcgtcaaggcgatgccaacgataaccgagacctatttgccgtcgctcggcaatagggctacaactagtagtggctttgaccaaggtcaggggaagaagccccgccaaaggactatgctgatgaacgcttaaaccgcccgagtctttacttaaatgcactacgataaggagcaagtgatgagcaagaaaggactgaccaccgcagccggcgccccggttgtcgataacaataacgtgatcaccgcaggcaaacgcggcccgatgctgttgcaggacgtgtggttcctggaaaaactggcccacttcgaccgtgaagtcatccccgagcgccgcatgcatgccaagggatccggcgcctacggtacctttaccgtcacccacgacatcacccgctacacccgcgccaagatcttctccgaaatcggtaagcagaccgacatgtttatccgcttctccaccgtcgccggtgaacgcggtgccgccgacgccgaacgcgacattcgcggcttcgccatgaagttctataccgaagaaggcaactgggatctggtgggtaacgatacgccggtgttctatctgcgcgatccgctgaaattccccgatctcaaccacgtggtgaaacgcgatccgcataccaacctgcgcaacccggtctacaagtgggacttcttctcccacctgccggaatcactgcaccagttgaccatcgacttcagcgatcgcggtattccgaagtcctaccgccacatgcacggcttcggcagccacaccttcagctttatcaatgccgccaacgaacgtttctgggtgaaattccacttccgctgcgaacaaggcattgaaaacctgatggatgaagaggcagaagcgatcatcgccaaggatcgcgaaagctcacagcgcgatctattcgaggcgatcaaacgcggcgacttcccgcgctggaagctgcaaattcagatcatgccggaacacgaggcctcgcagacgccctataacccgttcgatctgaccaaggtgtggccgcacggcgactacccgctgatcgacgtcggttatttcgagctgaaccgcaatcccgacaactacttctccgaggtcgagcaggtggcgatgaaccccgccaacgtggtgccgggcatcagtttctcgccggataaaatgctgcagggccgtctgttctcctatggcgatgcgcaccgctaccgcctgggcgtcaaccaccaccagatcccggtgaacggcgccaaatgcccattccacaactaccatcgcgacggcgcgatgcgcgtggacggcaacagcggcaatggcgccacctacgaaccaaacagcttcggcctgttccaggagcagccggacttcagcgaaccaccgctgagcattgagggcgcggccgaccactggaaccatcgtgaagacgacgattactacagccagccgcgcgcgctgttcaacctgctgagcgccgaagagcaccagcgcatgttcacccgcatcgccggcgaactgtcgcaggtgccggaacagatccagcgccgtcaggtcgagctgttcaccaaggtgcacccggactacggcgccggcgtcgccaaggcgttggggctgaaataacccccctgcagccatccactcagccgccctttcaggcggcttttttatgcctgggagaaacgctgcgccacccactgctgcaattggcggcgcgaaatcttgatgccgccgtttttcagctcgtcaggcagcggaagcaatgccgtcgggcgttggaaattggccagcttatcctgcgaccaggcgagcagcgcccccaacgacagcgccggatcgccgtcgatcaccgccaccggccgctggccgaactcagcgtccgccatcggcaccacaaacgcctgcgtgatctgcgggtgcgccgccagcacacgttcgatatcctcgggctgcaccccttcgccgccgctgaaaaacaggttgtccagccggccgagaatgcgcagttccccctccgccatcacgccgcgatcgcgggtcgcgaaccagccctgctcatcggccaacggctgcagatgcccatgacgccagtagccgagcgccaggctgtcggcgcggatccagacctcttcgtccaccagttttacttcgcggccgccgagcggcaggccgacacccggccgcgcatcggcgcgcttggcgcacaccgtggaggccagttcggtcagcccgtagccgcaccagcagcggatccccgccgcctccgcccgttcggtcagctccaccgggatcatcgcgccgccgagcagcaccgctttcaacgtcatgcccgtcagcggttgcgccaacagccgccagagctgcgtcggcaccagcgaagcatgcgtgcagccagccaatgcctccgccagcgggtgcgtctcgcgcaccgccagccgcgcgcccgccgccaaccagcgccagacgatgccctggccggagacgtgaaacagcggcagtgacagcagccagcaatcctcgcgttgaaaatccatcagctgcaacaccccggcggcgctggccagatggttggcgtagctgtgtgccgccgccttcggcatgccgctggaaccggaagtcaacgtcagcgtcgccagacgctgcgcatcccacgtcggcaggtctggccaacgcggctcggtcgagggaggcgtcaatcgaatcacctcttccggcagcgccagcaacgagtccgggccgaagacaaaggtcatatccaattccggcaacagctgcgccagcagcggcgccggcaaggcgggattgagcggcaacaggcgtgcgccgcactgcaacagcgccagataggccagcagcagtggatagctgtttttaccgcacagcgccacgccgcagcccggttcaacgccctgatgctggaaatccgccgccagttcatccacctggctttgcaacgccagccagctcagcggttgttcgccgagcaacagcgccgtcgcctgcggctgaaggcgcgcccagtgccgccacggccaatcgttcaacggcgccatagacactccagcgccgaaacatccagcagcggcaacgcgcagcccggccacgggcgcagcacctgcgcctgcatcaatcccagcgtgtccaggcccggcacggtatccggcgtcagccaatgggcaatgcgcgccagttgggtcaaccccaggctggattcgaggctggaactgatcactgccgtcaggcccgccgcgtgcgcctgcgccaccagcgtctggcaacgcgccaggctgccgaccagcgtcggtttgatcacgatggccgccacgcccggctcggcctgcaccacaaaatccgcctcgcgcacgctctcatcccaggcgatggcaatgccggtcgcccgggcgaagtcgcgcgattcatcacgggtcttgcagggctcctccaaaaaagcgatgcgatcgcgccacgctgggttaacgtacctggcgaagccgtcggccttggcgcgggtccagctgcggttggcgtccagccgcagccgcagatccggcagcgcctccagcagcacgttgacgatcatgccgtcacgcaccgcctcatacagccctactttcaccttggcgactttctcgcccggcaaagcgctcaatgtctcgaacagctcgtccggatcgccgctgcacagcggcgccttgcgaaaatccgcctgcgtcggcaaacgctgctccagctcggcctgcgcgcagctcagcccaaaggccaccgagggcagctcgctgtcatccggttcgttgcccgccagccacgcctgcagccagtccaatgcggcccgttcggcctgcgccggcgtttcccggctgaactccggcagcggcgcgatctcgccccacccctcacgctcgccctgacacagctgcaccacccatccgtcacgcgttttcaaccgctgattgcgcagcaccacgcccgcctccatcggcaggctgtaacggtatagcgccgcgctgcggtttgccccgctcattacgggttacgcttgaatttgctgaaatccggctggcgcttctcgttgaacgcgttgcgcccttcctgcccttcgtcggtcatgtagaacagcatggtggcgttgcccgccagctcctgcaaaccggcctggccgtcgcagtcggcattcagcgccgccttcaggcagcgcagcgccatcgggctgttctgcagcatttcgcggcaccagcgcaccgtctctttttccagatcggccagcggcaccacggtattgaccagccccatgtccagcgcggcggcggcgtcatactggcggcacaggaaccagatttcgcgcgccttcttctgaccgacgatgcgcgccatgtaagacgcgccccagccgccgtcgaacgagcccactttcgggccggtctggccgaagatggcgttatccgccgcgatggtcagatcgcacatcatgtgcaacacgtggccgccgccgatcgaatagccggccaccatcgccaccaccggtttcgggcaggtgcggatctggcgctggaagtccagcacgttgaggtggtgtacgccgctgtcgtcgcgatagccgccgtagtcgccgcgcactttctgatcgccgccggagcagaatgccttatcgccggcgccggtgagaataatgacgccgatgccgtcgtcgtaacgggcgttggccagcgcgtcgagcatctctttgaccgtttgcgggcgaaacgcattgcgcacctgcggccggttgatggtgattttggcgatgccgtcggcggacttgtgatacagaatgtcttcgaaatcgccggtgcaatcctgccaggcgatggcggcatacagctgttcttcattcggataaagcatgttcggttcctttaaccagggttaacgagaaaggtctgcagctcggcgacgaactcctgcggattggccagatgcgcgttgtggccggcctgcggcacgatgcgcaacggcaacccggcgtcgcgcgccagccgttgaaatttggggtcgttctcaccgcacagcacccgcagcggcacggtcagttggcgcagctgcggcgccagatagggctgccgcccgagcgatgtggcttcgagcatgtcggcgatcgccgggccgctgttgatcgaacgcgcagcgatcagcgcctggcggtgcacgtggctaagctctttgaacaccggttgctgataccagtccgccaggacttcggcaatcggctcactgcgaaaacgcgccgcccatcgcgcatcctgctcgcaacggtcacggcgcagttgttcgtcctcaagccccggattgccgccctcgaccagcacgccttgcaggccgtcgtggcgtccgtggcaagcgtgatacatggcgatgcgcccgccaagcgagtagcccaccagccaataacgctcgatgttgcgcagttgcagggtcgcggcgatttgcgcgctgatgtcgtcgaagccgcggcagctcaccgccacggaatcgccgtggccgggcagatcgatggccaacgacggccattccgggcagcgcgcggcgatcacccgccattcattgttgttgccaagcaggccatgcaaccatatcagccaggggcggcccgcttcgccctgttgcaaaattcgcgtcgccagcatcattgcaccgccatctgttgcaccaggtcttgcaggctttcggcccctgcgctcggcggcacctgtagctctatcaacgtggcgccgccgcgccgccagccttgctcaaccgcctgttgcagctggctccagttttccggccgcgcatagtcaagctggaacatcgccgccgcgtggctgaactcaacgttctgcggcatgcagtaaaagcgctgacgctcctcttccggcgtcggcagcagcgagaaaatttggccgccgttgttattgacgacgatcagcaccgtcggcgccgaacagtggcgcagcagcgccagcgcattgaggtcatacagggcagaaaggtcgcccaccaccgccaacgtcggcctggcggtggcgcgctgtacgccggcggcggtggaaatcagaccgtcgatgccgctggcgccgcggttgctgaataccgggtaaacggcaggcagcatcgttaacgcgtcgatcagtcgcaccaccaggctgttgccgagaaacagctggccgttctccggcagcagttccggcaggcggtgcgccagctgcgcttcgccaaagttatcgtgcagatgcgtggacgccgccgtcagcgctttatccgccagcgccgccagcccggcggcccacggcgcgcgcggttgcgcgggatgctgcgccaaccactgcgccacgccggcgcgcaggcgccgcccccggtgttgggccggatcgagccgccccggcagctcgtcgataatccaatattcttccggctgacactgcgcctgccattgcagcaggcgtttgccggtcaggctgccgccgaactgcaccaccagctgcgcatcttgcagtacgcgctgcgcctgcggatgcgcgagccacaaatcggcgcagggcagcggttgcccggtctgcgacagcacatcgccgatcagcggccagcccagcgtttcggcccagtcggccacctgcgcgccctcttgtgcgctcatgcgaccggccagcaccacgccgcgcttttgccgccaggagaaccagtccggctgcggcgacggcgccgtacgcgtctcgctttcctgcagccacggacgatcgctctgccaccagtcgcccagcgcggcggaccaatcggcatagtgacgctcatcgccgccgtacagcggttcggcgaacgggcagttgatatgcaaagcgccatgctgcaggcgcgccatcgcgctgtcgacgctggaggccagccacgcggccggaatatccggcgtcggacgcggcagatcgatcgccaacgtcgggtggctgctgtagagaccgttttgacggatcgcctgattggcgccgcagtcgatcagttccggcggccgatcggcggtgagaaacaccagccgttcaccggtcaggccggcttcgatcaacgcgggataaaggttcgccgccgcggtgccggacgtaacgatcaccgccaccggctcacgcgccgccttcgccagcccgagcgccaaatggccgagcccgcgctcatcaaaatgggtatggcagataaacgatcggttggccgcggcggccagcgtcagcggcgtggagcgcgatcccggagcgatacaaacatgccgcaccccatggcgggccagcgcctcgagcagcacagccgcccaccggcgattaaaaacacttgtcgacatagttcgctcacaagtcagttagcagagatcgtccccggcgcagccgacggacgccgcgcctgtagttacgttctgtattatatgaggtgttattttcacggcttttgcgccagcgcaagaacgccgtatatccctgggtgtttacaccagataattgtttgatttagaacaaaaaacaaacaattaaaacacaaacactttacacttgcggcgacgccggctcaatccgtccatacaaaaacaagggagataaaggtgctccaacggcggccagcgggaagtataggcgggataagggaaagcgatcggggaaacggcgggatgaacgacacagtctgcagaaaagcacgaggcggcctgcgccgccccgatgacatgatttatttgcgggccagcagcagccccagcaccagcccgacggtggcaccgatgcctacgctgtgccagggtttatcccgcacgtagtcgtcggtgcggtgcaccgcttctttggcgcgcgcatagtaggattcgccggtgttcgcccagcgcgccttgacctcactcagcgcctgctcggcgtgcgacttgatgtcaatgtaggcctgatccgcgcgatcgccggtgtattgcaacacttcttccagcgtctcggtcagcattctcagatcgtcatccagcgtagtttgctcagcatccgaatgtcttgccatagtgagatctccgtggttgaaaaattaagcgttcctacactatagacaaggatcgtcgcctgcggccatcggacttttaccctaaaacaccaattgcaccttggcggcctggcgcttgtcgccggcaaactccagcgcctgcgccagttggtccccggcgaattccgccgacaacagcggcagcggatcgaccacatcgccagccagccaggccaccgccagcgcgaattccgccacgaagcgaaacgatccgagcaggttcaactctttggcgatcaacaacatcagcgggaaatcagggaagctgccgcccatgccgacctgcaccacggtgcctgtggcgcgggtgatctccagacagcgctgcagcgacagcggatgtcccgccacttcgaaggcgacatcgaaatagcccttgtcctgctgatagtcgctaaaatcgtcgtccgcggcatgcaggcaccgattggcccccatttggctggcgatcgccaggcagcgcggactgagatcggcgcagacaatctcggcggcgcccagcgctttcagcgccgccaccagcagacagccgatcgggccgacgccggacacgaagaccttttttcccgtcacgtcaccgggctgcttcgccgcgtggacagccaccgccagcggttcggcgaacaccatcaccctgtcgtcgcgatcggcggcgtaaggaatgcactgcgcgctatccaccactttgtattgggtaaaagcgccgtcgacgtgcggaaaatacatcgcgctgccgaaaaagcgcatctcgacgcattgattgctttgctgctccagacagtatttgcactgcccgcagggtttgctgggattgagcgccaccttctgcccggccggcaactgtggcgaatcgctggcgaccacctcaccgatcacctcatggcccagcaccatcggctgacgcacctgaaaattgccgaccttgccttcctggaagtaatgcagatccgagccgcagatgccgccgcggctgattttcaccagcgttccctgccctcgataatccacttcttgcgcgatcaccgccacgtctcgcttgccgttgaccacacaggactgagtttgaattttcatcgcaagactccacggaaaaagattacaccgccgccgacatgccgccatcgacaaacagcagttgcccgttgacgaaggcggaggcgtcggcagccaggaacaccgccgcgccgatcagctcctgcggatcgccccagcgcgcggcgggcgtgcgttgggtcagccaggcggtgaaggccggatcgtcggccagcgcctgcgtcatctcggttttgaagtagccgggggcaatgccgttgacctgaatgttgtagcgcgccagctccacgcacatgccgcgcgtgagcattttcaccgcccctttggacgccgcataaggggtgatggtgtcgcggcccagctcactttgcatcgagccgatgttgactatcttgccgcgccggcgcggcaccatgtaacgcgccacggtctgcgacacgatgaagaccgccttctggttgacggcaatgatgtcgtcccagtcttgctccggaaactcggtgaacgggtggcggcgctggatgccggcgttgttgatcaaaacgtctatcgcgccgatgtccgcttcgatacgggcgatggcggcatgcaccgcctgagaatcggtgacatcgaacgccgccgcctcggcgctcagcccctcttcgcgcaaacgttcggcggcgtgcagggcatgttcttcggtggtggcgttgaccagaatatgcgcgccttgctgcgccaagccgcgtgccagcagaaaaccgatgccgcgcgaggcgccggtgatcaagacggtcttgttatccagtgaaaacagattgttcatagtgattcccggccatcaggcctccaatcggacaggcttctatctcagccgattgttaccggtaaaaacgtgatggaaatcactgaaaatcatgttacgaaaccctgttacccttaacgtgatctcacgcaggcagtcagcgggtaaaacttatctatctgattgaaaaacggctattttcaatagaagtacattcattgttatcgctaaatcgatgggttaacatgccgctatcccccttaccgcgccgcccgtgaaggccaccgaatgaaacacctccgcgttacgcgacaggacatcgcacaatgggccggcgtaacccaaactccgggtaaccaaacgctggtggtgaactgccgtctctcactcggcggcaccgtttgagccggcattcgggctaatcggcggcgtagcgcgggctttttcgctgcgcgccgcccaccacagaccgctgtttttcatcgcatagccgaatagcaggcccaccagcagggaaagcgtcaccagcggccaatcgccgccgccggcgaaggtcgcacaggcgccgataaaggtgccgggcacgaaccccagccactgctgtttggcctgaatgcacatcaggaacgccacgacgccggtcagtagataccccagcagattccactgcggcgccagttcgctgccgtggatgatcgccattgcccagaagacgccgctgcagcaggtcaacgcgccgatcaacagccctttcagcccgccctgcgggcaggcgaaatacgccgtgcagccgagaaaaccggcccaaccgatcagccccaggctgacggcaacccagccccaaacgccggagaggatcccggtagtaacggcaatggcgaaaagaacgttcataaagtgacctgcggcaaaaataaagcgcgcagtttacccgaagcgagtgattttttcgtaattaaaatcacaataaaaatgcaaacaaagaaatggaaatatcaaaaaagcaatgtttatcacaaaaaaagccagcgtgacgagcacgctggaataacacaacaccagggaaatcacgatctcaaatgaaatgcctacatgcgacgcctgtcgcccccctcccgaacgccggtttcagcgtgggaagcccgcacgcgttaccatgacgctcaacatcaaacaaatcacggcgctgctcaggaataacaagtgggtcgccaaatgcaaatcggcgtggtcgatcacaacgcccaacaggatcggcacccagttagcgatatacgcgatcacgtaaaacagggagatcaaacgcgcatggctggctttcggtgaaatcagattcaccagcgtggcgctgccgacgaagatcgcgccataggcgtaaccggcgatcaccatgcctgcggcggccagcgccagcgaatggatctgaatcgccacggcgaacaccccgaccgacaaagcctgagccaggcagccgaacatcagcgaatggcgggcgttgatgcgacgactcaaaatctggctgatgccggcaatcaccagatagacggcgaccacatagccaaagacgccacggctctgcatatccaacagtttttcggcgacgctcggccctatcgccagaatgctggcggcaaccgcccaacaaatgaacaatgccccggcgcacaggaagaatttaccgccggtcgcgcgcaggccatccgccagagagcttttcgccaccggcgcgttatccgccgctgcgctatcggcctgcgccgtcaccgcctctcgcggccagcgcagcatcacgcccagtgcggcgacggcggcaatggccatgatgatgatgaacggcaatgacgtggtatgaaaaccggtttgcagtgcgacgccgctaaagatcgggcccagggccaatccggtggtaaaggacagcgtcgcgatcaacgccgcattttttccgccgtcctgcggcccgaaacgcaccaacgcgatattcgccgcaccggtcagggcgccggtgccgacgccggccagcagccgtgccataaacatcatgaagaacgacgacgccaccgaaaacagcagcgcgccaagcaacaccaccaacagcgccggcacgatcatgctgcgcaggtcttttactttccccgccatattgcctacgccgaacagcgaaatcagcacgccggcggcataagcgccgtagatgatcgtcaggctgaccgagctcaacgccagctcatgttgataaagcggataaagtggcgtcggcgcgctgctgttcaacagcgctgacatcaatgccaacgccagaaacagcaagatagcgaaatgcgatgtacccgccttcgctttagccgtttcttcaacggcgatactttctgacatgttcaactcccgaatcgatcaggcattcgccctaaataaatgcgtcttcccgcatgccacgcggcttcaggaagcgcgcttatcatagcgttgggctatcacgcccaaaatagccaagaatgcatcatcgtgattcattaatgcagcatcgcagcgtcaggcatgcatttctgcagcatgcgatgccgccaagcgatggcgcaaccgcccaatgccacgccatacactgcatggttggccaggctggcgatcagcaaagccggatttttgccggccattccccaaagccccaaccccaccgagggataaatgaagcacagcgagatcagcgaacaggccaggccatacgtcagcgccccaacgagcaggccgccccccgacttaacgcgcgggcagatcaggcaatagaacgggatcgccaggctaatgccggcaaaatagtgcgcgccgtagcccatcatcagagcctctggcacatcgggaatgtcgccaggccgcaaaaaccaaaattgcccctgcagccattgattcatcagtttgccgatgaaggccaggttgagcttgccgatgagaccgacgctggaggcgacactgttcaccccatccatcgtcagcgtcgccactatgccaaacaagaccgccatcgccatggcgccaaccggacgcatgttcattgtttcgttccttatcacgttatgccaccgccgcctgctcggacttggccgaagcacgcttgcgcaccgccaacgcgccggacaacacgatcagcgccataccggcggcggcgatataagacagccgctcgccaaatatcagatagccaagcagcgtagagaaaataatggtgctgtaagagagaatgctgacaatcaccgcattgccacccccgtaggcgcgagtcatggcgatctgccccagactgccgaagacgccaatggcgcagacgcacagcagcattgcgccgtccagcaaggaaaagcccagcaacgcagtcatcaggccgccaaccagcgttcccaccagcgagaaatagaacaccacgcgcagttccggctcaccgcgtcgcaccagcttgccgacgttaaagtaagccagcgcggttaacaaaccggccgccagcccgaccagcgtggcaacgtactccccgttgggggcgtcggggcgcagcaagaccaaaatgccggcaaagcccaacagcacggaaaacaacagccgaccggtcagctgccctcgggtcgtgatgaacacgatcgccgactgaaagagggggttggtataacccaacgtggtggcggtggcgatcggcagatgtatcagcgaataaaaaccgcagtacatcgccgcattgcctatcgccgcccgcttcatatgcaatccgagatgacgggtgcgaaaaccgaggcgctggatcttgatcagcgccgcgacgatcagcacattgatgagagaacgataaaaaatgatgtcgaaaaatccgaccgtcgtcgacgccaacttgatgcaagcacccatcagcgcaaagaatccgctggcgacgaccatccacaaagctaccatgatcttctcttattaacggcctttggacagggccgtatcaacactacccggcggctttcaccgtcaacggtttatcgtccgcgcaagcgaagaacaccagcatttcggcaccttgctcgccggaaacgccctgatgcacgatatccacggtatcggtaaacgaatccccctgccggaacgtgcggcgttcaccggttttcctcacggtgagcgaaacgctgccgccgctcatgtacactgcgctgatgcaaggatgcgtatgccaggccagtaccttgttcggctctaccgtcaccttcagcatggtgatctgcggcgcgcctgcgggatactgacgatatgccgagccctcccatgcgctgtcggtcttgagcaacgtcgttttgacgatgccttcgccatgcccctcggcagcctgaaccggcccctgaaatactgccaacaatgccaaaatgccccacttaaccatcttatcgctccctgactgccgcgagtaaaaatgccaggcgccgcgcgcggtgaacctggcgagttgaaaaaacagcgttgtgctacagtcctttgatgcgctgctcgtattctgcgatgctctcggcgtagtagcggttaggcgccgcaaagttgcccaccatcacttcgatgaggtacggccccggatgtttcgctgcggcgccgagggcctcgtccagatcctccagcgtctccgccttcgcggaggcgacccccaggctgttggcaaacgctttccagtcatggttgggcaaggcggtatagtcggcggaaatgccgcgattttgcagcgtgtcgatgtgcatggcgccgtgcgcgctgttgttcatcaccacgaacaccaccttcacgccataacgcgcggcggtctgaatttcgatgccgtgcatcagcatgcaaccgtcgccggtgaccacgaggcaatcccgctgcggtgccgccagcttgatgccgatgcccgcgcaaatggcccaccccatcggcgccagggagctggaggtgtgataatccccccgcccggccgccagccagtgatgcgccatgaaaatgcggtgtgcgcccgaatcgaccacgacgttggtatccggattcatgcggctgcgaatgtgtttaatcgcatcgccgggatacagccggctttcgccctgggcgatgcgcgcctgcaacgtcggctgcggctgttccagcggcagtgcgcgaaccccttccaaccaggcgtcacgcaggtgagccgcgtcgccaagccgcgcgtcctcatcgccaaccgcggccaacaaacagtgcaacgtaccgctcaggctggaaaatatctgcagatccggctggtaatgcgagctcactttgtcgaagtcttcgtcgatcgccaccagcgttttattgccgtgcagtctcgggttccagttcagactgtcgcgctggctgagatcgcagcccagcaccagcagcacgtcgacgccttcaccgttgagggtttctaccgcgcgggcatggccggcaaaaccgtagacccctaatgccagggcgtgcccttcgggaaacgcgcccttgccggacaacgtcgtggcgacaggcaagcggtatttttccgctacccgcaacaacagcgcggcatcctgtggattgttcatccggttgcctaccaggcaggcgacgttgaggccgcgcagcagataatcatgcaacagctgttccaccgcttgcacatccacggccgcttcacggtgctgcggcactcgctcaggctggtcgcgacgatcgccgaacgcggttttcttctgcatgtcgaccggcacgctcagataggcgcgccctttccgctgtgggttcaggctggagaggctgcggcgcagctcatgctgcaaggtcaggttgtttttcgtttctatcgcggcgcaaagcaacggtttgacgatggtcagctcatcgatgccgctgttgctgccgtcctgaaaagcgccctgcgcctcatgataggtggcgatgctgccggccaggtacagcacggggatcttatcggcttgcgcggcggccatcgccggcaggaaattcatggtgccgggacctgaaatgcccaaacagacgccaaactttcggctggcgcgggcatagccatcggccataaatccgcatgcggtttcatgggcaccgacgatgccgacaatctcggaacggtcaatagaagtgattaacggataaaccagtttgccagggaccaaaaagatatgttgaatgccgcgcgctgcaaggccttgaataatgacatcggcgttgttgcgttccatcttctcggcgcctggcgccacggtaactctgactccgtcctccgtcgccaacgcaacgggggggcacagcatctctgcgtgagactccatttttttatatccagtcatatcatcgtgagctaacttgattcagagtcgatcccacttggcggtcgcccagaaataacgggaaccggctcttattcgtattgcttatgcattagggtggccttggtgtaaaatgtgcgtcgggtcgcagcataagcgccgataagaataagcattaccagacaaaaataaaggtgcaaaaccgcttcacggtgatgcatttatacatatcctgaaacattataaataatgatgatacgaagcatttttttcggtctccacaccagaataaacaccgcatcacaccgcttccttccccctcccgccagtctgtacagaggaggtgtgcaatgaactgggacgacgcccgattttttctcgccgttgcgcgctgcggcacgctacgcaaagccgccagccagctgcatgtcgatcaggcgaccgtcggccgacggctctccgctttcgaagatgcgctcggctccaagctgtttatccgcacgccgaaatccttcgccctcagcccgctgggggaggaaatgctggcggacgtgatgaagatggaaaatgcggtgcaggcgatcaaccgtaaagccgccagcggtgacgaaagcctgtgcggcaacgtgcgcatcgccaccaccgataccctggccgaagccttcgtgatgcctgcgctgcaagatctgcgggaacgctatccggccatcaccgtcacgctgctgacggcggtcaacatcgccgatatttcttaccacggcgcagatctggcgatccgcggcgcccgtcccgatgacgatgagctgatcatcaaacggttagccaccatcgaaatgggcctgtatgccactcagcactatttggcgcggcgcggcatgccggtcaagggcgaacagttgcgcggccacgatctgctgatgttcccgcgcgagctggtgccgcgccactggaacaatttctgcggcgaggccctgcacgagcccaacgtcgtgctgcaatgcaattcgcagctgctgctgcgttccgccacccgcagcgggctgggcatcggcctgctctccgcttttttggcggacaaagacccggaactggtgcgtctgttcccggagaacaaagactgggtggatatctggctggtgctgcatcccgatttgcaacgcgccgcccgcgtgcgcgcggtagtgcaggcgctggaaacgtcgtttagcgcccattacggctgagtgccgtttcgcccataaaaaaaggccgccgaagcgacctttttaccgtctgaagcgttatcagaacgtcggctgcgccatctgcaccagcgaaatcagcggctgcggataaacccccaacagcagcaccagcgcggcggagatcagcaccacgacgccaccggcggtcaacgcccagttgttcggggtgtcgcgctgcagcgattccggcgcgctgaggaacaggctgacggtcacgcgcaggtagtagtacagaccgatggcgctgcctaccacgactgcgccggtcagccaccacaggtgtgcgctgacgcccatcgcgatcacgaagaacttaccgataaagcccagcgtcatcgggatacctgccagcgacagcatcatcaccgtcatcaccgcggacaagattggcttgtgccagaacagaccacggtaagagaacagcgaatccgcatccgggccgcggtatgggctggacatcaggctgaccacgccgaaggcgcccaggctgctgaacaggtaaccggccagataaacgccggcggtttccagcgacagctgatgggtttgcaccgcaatcagcgccaccagcaggtagcccaggtgagcgatcgacgagtagcccagcagacgcttgatgttggtctggctgatagccatcaggttaccgaacaagatggagcagaacgcgatgatcgacaacaccatgcgcagcgcttcgttgtcggcggccggggcatacaggaacagacgcatcacgaccgcgaagatcgcgatcttgctggcggtcgccaggaaggtcgagaccggcgcaggcgcgccctgatacacgtccggcgtccacagttggaacggcaccagcgacagcttgaagcccagaccgacgatcatcatgcccatgccggccaggatcagcggctggtgcatcatgttttcctgcaggctcttgccgaggccggccagcgacagatcgccggattcggcgtacagcagcgccatgccgaacagcaggaacgacgacgcggcggcggacagcagcatgtacttgatggcggcttccagcgggcgcttctggcggtaggcatagcccaccaggccgaacagcggcagcgagataagctcgataccgatgaacagcgaagccagatggttggcgctcgccagcaggatgccgcccagggcggcgatcagcaccagcaggtagaactcttcgcggttatccggatagccgaccagccacggataggcgaaggtgcaggtcgccagactcgccagcagcaccagcccggtgtagaacatcgagtagccgtcaacccgcagcagcggggtgacgtccattgggcctgcctggccgacaaagtacagcgaaagcagcgccaggttgagaccgatcacggtcagggtggcgttgataaagtggtcgcgtcgccacgcaatgcctagcatcacaaccaccaccgtcaatccgacgatcaacagcggcagcagtgcgatcagttgttgaggagttattgtcatggcgaattacggccttgttgttgaaattgctgaaactgacgaaccaaaccagtgttgcacgttgctcatcgccgcgttggaagtatccagaatcggctgcgggtaaacccccagcagaaccagcaacaccaccagcagcagaatgatgaacagttcgcgcgcggtcatgccctgcagcggctggtctgacttaggcgcaccgtagtaagcgcgctgcatcatgatcagcgagtaaaccgaagcgaacaccagaccgaaggtggagatcacggtgatcaccggcaccacctggtagctgccgaacagaatcatgaattcgccgacgaagttaccggtacccggcatccccagcgtagccacggcgaagaacagcgacagcgcagggatgaacttgatacgcccccacaggccgcccatctgacgcatgtcgcgggtgtgcagacgttcatacagctggccgcagatgataaacataccggcggcagacagaccgtgcgcgatcatctggatcacggcgccctggtaagccagctggctgccggtgtagatggcgatcagcacgaagcccatgtgcgagaccgaggtgtaagcgataagacgcttgatgtcggtctgcgcgaacgccatccaggcgccgtagaagataccgaccacgcccagccacatggcgattggggcgaactcgtgtgaagcctcagggaacagcggcagactgaaacgcagcaggccgtaggccgcggttttcagcaaaatgcccgccaggtcgacggaacctgcggtcggcgcctggctgtgcgcgtccggcaaccagccgtgcagcggcaccaccggcattttcaccgcgaaggcgatgaagaagcccagcatcagcagatattgcacgttgtgggacatcggcgtttgcagcaggtcttcgtaatcgaaggtccacacgccggtggcgttgtagtgcacgaacaccaggcccaggatcgcaatcagcatcaccagaccgctggcctgggtgtagatgaagaacttggtcgccgcggtgatgcgggttttaccgtccgacgccttgtggccccacagcgcgatcaggaagtacatcggcaccaacatcatttcccagaagaagaagaacaggaacatgtcgatggcgaggaacacgccgataacgccgcccaggatccacagcaggttgaggtggaagaagccctgatacttctggatttcacgccaggaacagaggatcgccagcacgcccagcagaccggtcaacaccaccatcagcagcgacagaccgtccagcgccaggtggatggagatgccgaagcgcgggatccacggcagcaggaattcgctctgccactgcggaatgcctttcggcgtggtcaatgtatagccgccctgcatccacagctgcagagagagcgccaacgtcagccccattgcgatcagcgctatccagcgcggcaccttagtaccgaagcgctcaagctgccagcacagcagaccgccgataaaggggataagaattagccaaggtaatagcatggcgttttgtgtcccttatacgaataatttcaaactttgtacgtagcgcctgcccggcgctacgcccgaaaaatgcgtctgtttaaattattcaattaaaccagaatcaacagagccaatacgaccactgcacccacacccatagacgctatataccaacgcacctggccgttctcgctcaccgtcagaccgcggttcccccagcgggagaagacggccggcaggttcatcagcgagttcagcggatcgcgttgcagcagcttcgcaatgcccagatacggcttgacgaatactttgtcatacagccagtcgaagccccaggcatggaaccaccaggtcgagaagaaacgccccggtgcgctgttggcgatgctgttgaccaggctgcgtttgcccagccacagcgcggccgccagcagaatgccgacgatagccaccacgccggaggtgatttccagcgtcagtacgctgccgtgcgccagctcggtcgtctccggcagcacgccctgcaacggcggcacgatcatcgcgccgacgaaggtggacagcaccagcagaaccagcagcggcaggtggtgagtgatgcctttaccggcatgcgctttgattttctcttcgccatggaacacgatgaaaatcatacggaaggtgtacagcgaggtcatgaacgcaccgaccaggccggcaaccatcaggttgatgtggccgttggccatcgcgcccgccaggatctcgtccttactgaagaagccggccgtgaccagcggcaacgcagacagcgccgcgccgcccaccaggaagcagacgtacaccagcggaatgctcttgcgcaggccgcccatcttgaagatgttttgctcgtggtggcaggccaggatcaccgaaccggacgacaggaacagcagcgccttgaagaacgcgtgagtcatcaggtggaagatcgccgcgtcccatgcctgcacgcccagcgccaggaacatgtaaccgatctggctcatggtagagtaagcgagcacgcgcttgatgtcggtctgcaccagcgcggcgaagccggccagcagcagagtgaccgcaccgacgatgcccaccagatgcagcacttccggcgccatcaggaacaggccgtgcgtgcgggcgatcaggtagacgcctgcggtcaccatggtcgccgcgtggatcagtgcggaaaccggggttgggcccgccatcgcgtccgccagccaggtttgcaacggcagctgcgccgatttaccgaccgcgccgcccagcagcatcagcgtcgcccaggtgatggccgtatcgcccaccgccagtttctgcggcgccaggatcatcagctcgcggatgttcagcgtgcccagctcgttgtagaggatgaacagcgcgaacgccaggaacacgtcgcccacgcgggtgacgataaaggctttcatcgccgccgcgccgttggccggatctttgtagtagaagccgatcaacaggtagctgcacaggcccacgccttcccaacccagatacatcagcagcaggttgtccgccagcaccaagaccaccatgctggcgataaacaggttggtgtaggcgaagaagcgcgaatagccctcttcaccgcgcatgtaccaggaagcgaacatgtggatgaagaagccgacgccggtgaccaccgacagcatggtcagcgacaggccgtccagcaccagagtcacgccgatattgaagttgccgacggccatccaggtccacaggctttgctcgaacagctgcacgccggcggctttctgggcgaagaaatccatcgccacatacaccgtgaccagcgcagccaggccgatagagcccacgccgacggttgccgccgtgttctcagaccagcgaccgcgggaaaatgccaacagcaggaacccgatcagcggtagcagaattgttaaatataataggttcatccgcgcatctcactgacagtatcaatattcagggtatgacgacgacggtagagctgcagcagcagcgccaggccgatactggcctcggctgccgccaggctgatcgccaggatgtacatcacctgcccgtccgcctggccccagtagcttcccgccacgataaacgccaacgccgcagcgttgatcatcacttccaggctgatcagcataaacagcaggttgcggcgcaccagcagcccggtcaacccgagcacaaacaggatagccgccaggatcaggccgtgttgaagagggatcatgcttgctcctccgattttcttctcgccatttcgccacccaccggcgcgttgctcagcacctcgccaggcttgtgctcgcggccgatatggaaggcgacaaccagccccgccaacagcagcattgaagccagctcaaccgccagtacgtaaggcccgaacaggctgatgcccaccgccttcgcgtcgaccatctcaccgctgatgccctgatcggatacgctgcggatcgcaacgatcaataccaccagcagcgccagtgacagcaggccaggcccgatccacaccgtcggcttcatccagtcgcgctcttgctgctgcacgttgccgaggttcagcatcatcaccacgaacacgaacagcaccatgatggcgcccgcataaacgatgatttccaatgcggcggcaaagtaggcgccgagagagaagaagactgccgagatcgccaataacgagacgatcagatacagcagcgcatgcacagggttggtatgggtgatcacgcgaatcgtcgcggccaccgcaatcaaacctgccagataaaatgcaatttccatgcttgctggctccttagggcaacagacctttgacgtcgatcggtttggcttcgttttcggcttcgcctttggctttgccgtcaatcgccataccggccatccggtagaagttatattccggatatttacccggccccgagatcaacagatcttctttttcgtacaccagatcctgacgcttgtactcgcccagttcgaaatccggcgtcagctggatagcggtagtcgggcaagcctcttcgcacaggccgcagaagatgcagcgcgagaagttgatgcggaagaactccggataccaacggccgtctttctgttctgccttttgcagcgagatacagccgaccgggcaggcaaccgcacacaggttacaggcgacgcagcgctcttcgccgtccggatcgcgcgtcagcacgatgcggccgcggtagcgtggcggcaggtacaccggttcttccggatacatctgggtttcgcgcttggcgaaggcatgcatgccaatcatccaaatgctgcgcatctgggtgccgaaaccaaccactaactctttcaatgtcatggtttattcaccccttattgagcgttgtacaaaatgaccgcggcggttgccagcaggttcagcagcgtcagcggcaggcacactttccagccgaaggacatcacctggtcataacgcggacgcggcagcgcggcgcggatcaggatgaacatcatcatgaagaaggccgttttcaacgcgaaccagatgaatggcggcaggaacggaccctgccagccgccgaagaacaacgtcacaatcagggcggacacggtgacgataccgatgtattcccccacgaagaacagaccgaacttcatgccggaatattcgatgtggtaaccgtcggccagttcctgctcggcttccggctggtcaaacgggtgacggtgacacaccgccacgccggcgatcgcgaaggtcacgaagccgaagaactgcggaatgacgttccagacgtgcgcctgagattcaacgatggcctgcatgttgaacgaatccgcctgcatcaccacgcccatcagcgacaggccgatgaacacttcgtagctcagggtttgcgcggaggcgcgcatcgcgcccaacagcgagtatttgttgttgctcgaccagccggcgaacagcacggcgtacactgccaggccggccatcatcaggaagaacagaataccgatgttgagatcggacaccgcccaggtcgggctgaccggcacgatggcaaatgccagcaacagggaagtaaaggcgatcatcggcgccagggtgaagatcacccggtcggagaatctcggcacccagtcttccttgaagaacattttgatcatgtcggcgaccagctgcagcgagccgccccagcctacgcggttcggtccgtagcggttctggaacaggccgagcaggcggcgttcgccgaagctcatgaacgccccgcacgccacgaccaccaacaggatcacgaccgctttaagaatggcgatcaagatgtcgatcacctcaggggtaaaccagctcatcgtgccgcctcccgcagattgtctaccttagcacccaccaagatcggcgggatccctggcaagccgagcggcaaaccaacctggccctgggtcagggtttcactcagacgcaccggcagacgcagagtctggcccgcgcagctgaactccaccaggctgcccgcattaacgccaagcgtcgccgcatcggccgggttgaccatcacgtaggcttccggcatacgctgctggatcacgtgagagcgctgcgacatttcatcgctgccgaacaggtggtagtaaggcgcgacacgccagccgtcgaccggattgaacgcggcaggcacgcggtcgaagtaaccgaggctgccctcccccgcttcgatcaggcgcacgcccggatcgccgtggcgcagtttgccgcccacttcggcctggaacttgttccatgcctgcggtgagttccagcctggcgcccaggcgaacgggatctgctgacgatcggccagcgggctgttgttcccttccatcgagaaggcgaacatggtgtctttatcctgcggctgacgcggctcgtgcacgctgatgttggcgcgcatggcggtacggccgctggaacggtgcggcgaacgcgccagcttctgaccgcgaatgcggaacgtcgcgtccggcgcggcatcgacaatgccctgcaactgcggcaacgcggcgacgcaagcggcgatcacgtcatcgagctgggtccagtccacgtggcggctggtgtaggtggagtgcagcgagtgcatccagcgccagctttccagcatcacggtgaactgattcttcttggcgtcgtcgtaataagccggatcgtatacctggaagaagcgctgcgcgcggccttcctggttgatcagcgtaccgtcgctctcggcgaaactggccgaggagaggatcagattggctttgtccatgatcgcggtgcgctggtggtcggcgacgatcaggttattgaccttggccaacgccgcgtccacttgcgccgccggcgcatggcgatagagatcgttttccatcacgatggcggtgtcggctgcgccgctcgccagctgttccagcgcctgatcgagcgaaccgccgccgatcatcgccaggcccatgctgttggctgcgcccgccacgaaggtgatgccgacatcggaaccgcggcccttcaacgctttggcgatgttggccgccgcttcgatgatggcttcgctgccggcgttgctgccggtcacgatcagcggtttgcgtgcgccggtcagcgcctgcacgatgatatcgactttcttgttcaggccttcagccagatcgttcaccgccggcgctgcgctatccagcgcgtgagcgatggcgaagccgaagcgcgcctgctcgtctaccggcgcgcggtagttccaggcggcgatgtcatccagacgggtgttatcgacgttggtggtgaacaacggatacttggcgtgttggccgatattctgcaccgccgcgatctgccagtcggccacgcgttgcgccgccgccatcgcgcgggctttacccttgacggcctgacgcacggacagcgcgatgcgcgcgccggtttgcgtcaggtcttcgcccaacaccagcaccgcgtcgtaatcttcgatctcacgcagcgccggcgtatgaacgccgccgttcttcagcacgttcagcatcagcgccagacgtgattgttccgcctgagcgataccggtgtagtagttctctgcgccaaccagctcgcgcagcgcgaagttgctttccaggctggcgcgcggggagccgatgccgatggttttcttcgcctgacgcaggatgtccgccgcgccctgcatcgcctgctcggcgttcagggtgatccagtcgtcgccgcgcagctgctgcggttgacgcggacgatctttctggttgacgtagccgtaaccgaaacggccgcggtcgcacaggaagtagtggttcacgctgccgttgtaacggttttcgatacggcgcagctcaccatagcgctcgcccgggctggtgttacagccgatgctgcactgctggcaaatgctcggcgcgaactgcatgtcccatttacggttgtaacgctcggagtgcgttttgtcggtgaagacgccggtcgggcacacttccaccaggttgccggagaactcgctttccagcgtgccgctttccgggcgaccgaagtagacgttgtcgtgcgcgccgtacacgccgaagtcggtgccgtccgcatagtctttgtagtaacgcacgcagcgatagcaggcgatgcagcggttcatctcgtgcgagataaacggccccagttcctggttgttgtgggtgcgcttggtgaagcggtagcgacggaagctgtggccggtcattaccgtcatatcctgcaggtgacagttaccgccttcctcacacaccgggcaatcgtgcgggtggttggtcatcaaccactcaaccacgctttcacggaactgcttcgcttcgccgtcatcgatggagatgaaggtgccatcggatgccggggtcatacaggacatcaccaaacggccgcgcgtatcttccgcgttttggtattgctttaccgcacattggcggcaagcgccgacgcttcccagcgccggatgccagcaaaagtaaggaatatcaaggccgagggagagacaagcctgcagcaggttgtccgccccgtctacctcatactctttgccgtctacatgaatcgtagccatagtcagcatgcttccaagtggcctgccttgcggcaggcgttaatcaaaaattctggccgtgttcgggcgaattcggcttaccagcgctgcttcagcagattgttcggctgaatgccgccaatcgcatgggcgttgccgaagtgctgcacggcgatacccgcctcgaactcttcacggaaatatttaatcgcgctttgcagtggctctacggcacctggcgcgtgggcgcagaaggttttgcccgggccgagggaacggcacagctgttcgagggtttcaatatcccccggctgcccttcgccgttttccaacgcacgcaggatcttcacgctccacggcaggccgtcgcggcatggcgtacaccagccgcaggactcgcgggcgaagaactcttccaggttgcgcaccagcggcaccatgccgatttcgtggtctaccgccatcgccagcgcggtgccgagacggctgccggctttaccgatcgcgccgtattccatcggcagatcgagatgatcggcggtcaggaagtcggtgcccgcgccgcccggctgccaggctttgaaacgcagaccgtcgcgcatgccgccggcgtagtcttccaggatctcgcgcgcggtggtgccaaacggcagctcccagacgcccggatttttcacccggccggagaagcccatcagcttggtgcctttgtcttcactgccggagatgccggtgtaccactccacgccgttcgccaaaatggccggcacgttgcacagcgtttcgacgttgttgacgcaggtcggcttgccccacacgccggcgctggccgggaatggcggcttggagcgcgggttggcgcggcggccttccagcgagttgatcagcgcggtttcttcgccgcagatgtaacggccggcgccggtgtgcacgatcagctcgaaatcaaatccggtgccgagaatgttcttgcccagatagccggcttcggtggcttccgcgatggcgcgacgcaggtgcgccgccgcttcgatgtactcaccgcgcaggaagatgtacccgcggtaggctttcagcgcgaacgcggagatcagcatgccttccaccagcaggtgcggcaactgctccatcagcaggcggtctttataggtgcccggctccatctcatcggcgttacacagcaggtaacggatgttcatggattcgtccttcggcatcaggctccacttcaaaccggtggagaagcccgcgccgccgcggcccttcagcccggaatctttcaccaggccgacgatctcgtccggggccaggcctttgagggccttctctgcgccggcatagccgtttttgctgcggtattcgtccagccacagcggctgcttgtcatcgcgcagacgccaggtcagcggatgcgtttcgggagtgcgtacaatgtgcttggtcattggtactgctccagtagcgtctcgatatcttcaggcttcagctgactgtgcgtgtcgtcatcaatcatcatggtcggccctttatcgcagttgcccagacagcaggtcggcaacagcgtgaagcggccatcaaaggtggtttgacccggcttgatgttcagcttcttctcgatagcggcctgaatgccttggtaaccggtgatgtgacaaacaacgctgtcacaataacggatcacgtgacgtcctactggctgacggaaaatctggctgtagaacgtggccacgccttctacgtcgctggcggggatgcccagcacttccgcgatggcgtaaatcgcaccgtccggaacccagccgcgctgcttctgcacaattttcagtgcctcgatggaagcggcgcgcggatcctcgtaatggtgcttttcgtgctcgatcgcatcacgttcttccgcgctcagtacaaatgcatcaacgccgctctgaggagcggctgcgttgatgggctcgagcgcatcattgactgcgtgattgtctttttgatcatgcatagttagcggtccacatctgacattacaaaatcgatactacccagatagacgatcaggtcggaaaccaggctgccacggatgaccgatgggatctgctgcaggtgcgcaaagctcggcgtacgtacccgggtgcgatagctcatggtgctgccgtcgctggtcaggtagtagctgttgatccctttggtggcttcaatcatctggaatgattcgttggctggcatcaccgggccccaggaaacctgcaggaagtgggtgatcagcgtttcaatgtgctgcagcgtgcgctctttcggcggcggcgtagtcagcgggtgatcggccttgaacgggccttccggcatgttgttcaggcactgttcgaggatgcgcaggctctggcgcagctcttccaccttcagcatcacgcgggtgtagcagtcgctggtgccgtcgccgaccggcacttcgaagtcgaagttctcgtagccggagtacgggcgccatttacgcacgtcgaactcaacgccggtcgcgcgcaggccggcgccggtcacgccccactccagcgcttctttggcgttataagacgcgacgccgatggagcggcctttcaggatgctgttcttcagcgccgctttcacgtaggaatccagacgcttcggcatccagtcgaggaattcacgcagcaggcgatcccagccgcgcggcagatcgtgcgcgacgccgccgatgcggaaccaggccgggtgcatacggaagccggtgatcgcttccaccagatcgtagatcttctgacggtcggtaaaggcgaagaacaccggggtcatcgcgccgacgtcctgaatgaaggtggagatgtacagcaggtggctgttgatgcggaacagttcggacagcatcacgcggatggtgtcgacgcgctcaggcaccttgatgccggccagtttctcgaccgccagcacgtaaggcatttcgttcacgcagccgccgaggtactcgatgcggtcggtgtacggaatgtagctgtgccaggattgacgctcgcccatcttctcggcgccgcggtggtgatagccgatatccggcacgcagtcgacgatctcttcgccgtccagttgcagaatgatgcggaacgcaccgtgcgcggacgggtggttcgggccgaggttgaggaacatgaagtcttcgttctcggtgccgcgcttcatgccccagtcttccggcttgaaggtcagcgcttccatctccagatcttctttctgcttggtcagcacgaaaggatcgaattcggtggcgcgcgccgggtagtccttacgcagcgggtgcccttcccaggtctgcggcatcatgatgcgcgacaggtgcgggtggccgtcgaaggtgatgccgaacatttcccaggtttcgcgctcgtaccagttggcgttcgggaacaccttggtcgccgtcggcacgtgcaggtctttttcagacagcgccaccttcagcatgatgtcgcggttgcgttcgatggaaatcagatggtagaaaacggagaaatccgcagcgggcaggccgtcgcggtgggtgcgaagacgttcgtccacgccatgcagatcgaacagcatgacatacggcttcggctgttttctcaggaacgtcattacttccagtaactggtcaggtttaacccataccacgggcatgccggtgcgggtggcctgaacagtaaaggcttccggcccaaaacggttgcgcagttcgccgatcaccgggtcgtcaaggtgatctcgggtctgccaggcaggcaaggcgtcgtgcgtcgtcaaatctgtcataattttttttcaccacactaaagggttattcgccgcaagtttcacttttcgctgtgttaaccaatagcgcactaagatggacgttaaatgaacgtcttaaatctcgtcaggcgtccggaggttggtcaccgcgatgcgctcgccgtgtttacgctctctttcagactgcatattggcgcggtaaacgccctgatcgccgacaacccacgacagcgggcgacgttctttgccgatagattcctgcagcagcatcagcgcttgcatgtaagcttccggacgcggtgggcagccaggaatgtacacgtcgaccggcaggaacttgtccacgccctgcaccacggaatagatgtcgtacatgccgccggagttggcgcaggcgcccatcgagatcacccacttgggctccagcatctgctcgtacaggcgttggatgaccggggccatcttggtgaagcaggtgccggccaccaccatcaggtcagcctgacgcggggaggcgcgcaacacttccgcaccgaaacgcgccacatcgtgaacggcggtaaacgacgtcaccatctccacgtaacagcacgaaaggccgaagttatacggccaaatagagtttttacgcccccagttcaccatgtcatgcagcgcatgttcgagtttacccatgtaaaccgtgcggtggacctgttgttccaggggatcggcgacgatctcctgtttttgcaggggataacggtcgttctcaccgttcgggtctatgcgggtgagcgtatagtccatcttaatgcctcgctgttactgcggatgactgttggtgttagtgatcgtgcttggtttgctgcggcgttgggaacgcgccggagtccaatccaacgcgccgatgcgcaccagataaaccagaccggccaatagcaccaaaatgaaaatggcggcttcgataaagcccacccagccgctctcgcgaatcgagaccgaccaggcatacaggtataaggcttcaacgtcgaaaataacgaagaacatggccaccaggtagaacttggcggacaagcgcatgcgcgccgtgccgacggagtcgatacctgattcaaacggggtgtgtttggcgcgcgcccgggctctcccgcccaagaagaacgcacccagcagcattaagccgcaaagcccgatagccacgacgagaaatacggcgagcgcccagtgatgagcgataacttcagtggttgttgacatactctatgcttactcatcaaaagtggcgtcgatcgcactgctcttgtcaccggcagttagtgcgccacatcgatttaagggaaggataaataaccacacaaacaaactgcttttacagcgagttaggcagcgtttttctgtgggctttttactcctttctataaccttttgtcaactttgacaaaagtatctacacactagtttacatacgtatcatttgattaacatttgatgcgccagggacaggctaaatcgtgtcagttaatttttgtgtagaaacagatagatataaaccaacatgcacatttcagttttactataccattgtctcaggaattccctgttcttccactcactacctaggggtatttttttgatccaggacacgttttcagcataaatcctcaaaaaaagtgtggccctttaacaattttcctcaaattaagccgcaaaaacggccgccataagctaacaaaataaccctaacattaccatgcctttaactcattcaatcttattgttcaaaaaataaacccagcatcttaaacccggtcaaattctcttttcagcaacgcttaaaagttaataaaacagccaactcataacaaaatcgtcattaaatccctataacagtaaaaatcgccaaaaaacggccaaaaaaaacctccgccgaagcagaggtttttcatcagatatcacgccgcggcgttattcttcttcgtccaccaggctggcatcatcctgatcgccctggagaccggcttccgcgccgttgaagccatagccgtcattgccgccctgcatcgcgctgaagatggccattgccagttcgttgctgcactgcgcgtttttgcacagcgcatactgggtatccggcagcggcggcaaaccttccaccgcgcccagcacccgcagatcggggctcatcatctcgatcggccgcgcggtcacacccagaccggccttacaggccgcccgcaccgcagacagcgtggaggcgacgtaggcgatacgccacgggataccggcttcgtccaactgtttgatcgccagcgcgcggaacgggcttggttcatccatcaccaccagcgggataggttcgccggcctgatagtggtaatcggcagcgcagtaccacagcgtcggcgacgtgcgcagcacgatgtgcgggtgcccggccggatcggccgtggtcaccgccagatcgatctcaccctcttccagcagatcgaccatcgtcgtgctgcgctttacgcgcacgtcaatggccagcttcggatagatggcggtcacgcggttcaacaggaaaggcagaatggtatcggcggtgtcgtcggaagcgccgatggtcagaacacctttaatattgttgtacatcagcgaggtacaggcttcgtcgttaaagcgcaggatcttcctggcataaccgagaagctgaataccatgctcagtcaggagtttgttgcgcccatggcgggcaaacagttctttgccgaccagttgctctaatcgctgcatttgttggctgacggctgattgcgtacggcaaacggcaacagccgccgccgcgaaggtattcaaatcagcaaccgcaacaaaggttcttagcagatcgaggtcgagattaagtatcggacgatttgcagttgtcatagtgtattcttcacttttttaaattctaatttacgaactactaccctggtgtgtttctcagacgccgttgaaaaggacggagcctgttatgacagtaccccactcataagtggagggcaaaaaaattacttatgattcgttacctctatcgccttttaaaatgcgatctatcgatggtgcttatagaacgcgggggactgaataccggtggaaagggaaaacccccaccgaacctgagattttactcattgataccgcctaatttccactccattcgtgctactgagaatccttatcaaccggcgttcagactgcattacagagtaagaaaaataaataattaacggcaccaacttcgtgttatcactcaatgaatttaataaattcaatcagtaagatttttactttaaataataatcctataaccacataaacaatgcttaagctgaaatataaagtaaagctaatgtaaatatgccattttcttagtgtggtgcgctaaccggcaacccgctatcagacaactccggtattatcgttcctttacagtttattgaagcccattctcactttcggcttatcatttcactgctaccggccgcgatcgccggcacgtctcgtttatcgacacgcaatttaacagaacaaaaccctagtaaaattatagttcatgaaattatgaaccacaaaataactttacctttgcttatcataactaaaatccccctttacgacatgcatttgcaccaaaggcgtgcaaaacccttcaaaagcaactacgccaggagtacattgggcgggttgcggcgtcccacggtaggagcgcccctatcccagcaaaaggctcaactttttatgtcccccattgagaaatccagcaaactggacaacgtctgctatgacattcgcggcccggtgcttaaagaagctaaacgtcttgaagaagaaggcaacaaagtcctgaaactgaacatcggcaaccctgccccgttcggtttcgacgccccggacgaaatcctggtcgacgtgatccgcaatctgcccacggcgcaaggttactccgactccaagggcctcttctcggcgcgtaaagcgatcatgcagcactatcaggcgcgcaacatgcgtgacgtgaccgttgaggatatctacattggcaacggcgtctccgagctgatcgttcaatccatgcaggcgctgctcaacagcggcgacgaaatgctggtgccggcgccggactatccgctgtggaccgccgcggtctcgctgtccggcggcaaggccgtacattacctgtgcgatgagcaggccggctggttcccggatctggacgacatcatcagcaagatcaccccgcgcacccgcggcatcgtgatcatcaacccgaacaacccgaccggcgcggtgtacagtaaagcgctgctggagcagatcgtcgagatcgcccgccaacacaacctgatcatcttcgccgacgaaatctacgacaagatcctgtatgacgaagcggagcatcattcgatcgctgcgctggcgccggatctgttgaccgtcaccttcaacggcctgtcgaaaacctaccgcgtggcgggcttccgtcagggctggatggtgctgaacgggccgaagaagcacgccaaaggctatatcgaagggctggagatgctggcttcgatgcgcctgtgcgccaacgtgccgatgcagcacgccattcagaccgcgctgggcggttatcaaagcatcagcgaattcattcagcccggcggccgtctgtacgaacagcgcaaccgcacctgggaactgctcaacgacattccgggcgtctcatgcgtgaagccgcagggcgcgctgtatatgttcccgcgcatcgatgccaaacgcttcaatatccatgacgaccagaaactggtgctggatctgctgctgcaggaaaaagtgctgctggtgcaggggaccgcattcaactggccctacccggatcacgtgcgtatcgtcaccctgccgcgcgtagacgagctggaaatggcggtcggcaagctgggccgcttccttgaaggctaccatcagtaatcgcctggggcgcagcgccttgctgcgcccttctctcattgcccggttgcaaaattcgccgtcactgcttcacaatggggccctcacttgccgttaaagagagcaccatgagccagagccatttcttcgcccatctgtcccgcctgaaactgatcaaccgctggccactgatgcgcaacgtgcgtaccgagaacgtctccgaacacagtctgcaggtggcctttgtcgcccacgcattggcggtgatcaagaaccgcaaattcaacggcaacctcaacgccgatcgcgttgccctgctggcgatgtaccacgacgccagcgaagtgatcaccggcgacatgccgacgccgatcaagtactacaatccgcagatcgcccatgagtacaagaagatcgaaaagatcgcccagcaaaagctgctggacatgatccccgctgagctgcgcaacgatttccgcaccattctcgatgagcactactacagcgaagatgaaaagcaggtggtgaagcaggcggacgcactgtgcgcctatctgaaatgcctggaggagctgtctgccggcaacaacgaattcaccctggccaaggcgcggctggataaaaccctggagcagcgccgcagcccggaaatggactacttcatggaggtattcattcccagcttcagcctgtcattggacgaaatcagcctcgacagctcgctgtaaccccgccggcgcagcctcgctgcgccgttaaaaaccgtagagccacggcaccacaatcacgctgaccgccatcaccaacagggtgaacggcacgccgagccgcacgaaatcgccgaacttgtaattgcccggccccagcaccagcgtattgaccggtgaagagaccggcgtcataaaagcggcggacgcggcgacggcgataatcatcgcgaacgggtatggcgatacccccatttcgcgcgcggctgcaatggcgatcggcgccatcagcaccgccgtcgcggtgttggaaataaacaggccgatggtggcacacaagacgaacaggcacagcagcatcacgcgcggccccgcgccaccggcgacgtccatcagcccgctgacaatcagatccaccccgccggtcttttgcagcgcctgcgcgaacggcatcatgccgacaatcaaaataatgctcggccaatggatcgatttataggcgctctccatatcgatgcagcggaacttgcccatcagcaagcaggcgatcagcgccgcgattgggttggggatttcgtcggtcagcatcatcgccaccatcagcgccagacaaaacagcgcgtgcggcgcctgcgtgatggccggcgccacttcgtccacctcggccggcagattgagcacgataaagtcgtgggttttggcctgcagctgacgaatcgccttccagtcgccgatcaccagcaagatatctcccagctccagcggctcgtccaccaatttgccgcccagcgtctcgccgtggcggcggatgcccaccacgttcagatcgtagcggctgcggaacgccgcttcgcgcaggcttttacccagcagcgccgagtccgggatcagcgagacctccgccatgccgacgttgcgcgactgttccgagaagtaatcaccgcgcagcaccatcggctccagccgctgttcgccacagaattcgcgcagatcgacctggctgtccgacatgtcgatcaagaggacgtcgccctcgcgcagctcggtgctgccggaggcgctgaccatcacccgccggaagcgtttccagcgctcgatgcccaccacgttggcgccatagcgcgcacgcaggtgcagctcgtccagcgaacgcccgatcagcggcgaagcgctgcggacagccaaccgccgcgcacggccggtcagcttataatcgcggatcaggtcacggaaggtgcggcgctgccagtcgtcgccggctttgcccgtgtcactgctgcccagccaacggcgggcgatcagcatgtagccgacgcccagcgccagcaccgccaggccgatgggcgtcacgctgaagaaaccgaaaccatggatgccttcgcgcaccagttcgctgttgaccaccatgttgggcggcgtggccaccagcgtcatcatgccgctgataagcccggcgaaactgagcggcatcatcagccgccccggcgcgatcttcattctcgccgtcacgctgagcaccaccgggataaagatcgccaccacgccggtcgagctcataaatgcccccagcccggcgaccgtcaccatcagcagcatcaacattttggtttcgctgctgccggcgactttgaccagccagtcgcccacctgataagccacgccagtgcgcaccagcccttcgccgatcacgaacagcgcggcgatcaaaatcacgttgggatcgctgaaaccgaccgtcgcctcctgcaggctgagcgtgccgctcagcacgaaagcgatgatcaccaacagcgccaccacgtccatacgcagcttgttggtggtaaacagcacgatggcaatcagcagtaaactcagcacccacagtaattcgctgttcaaaacggcctcatccggcaaatgtccaaaggcctaaaaaatagcataaaaaaaccccgccgaggcggggtctaatcaattagggtgaagataatgccacttaggccagccggcgaacgatcgcgccctgcgccgttttatcgacggcgatctgcgccagcgaatccagccgcaggtcgacctgctccagcttcggcgcatcggccggggcgttgaccgcaatcacctggcaacccgccgccaggccggagagaatgccggccggtgcgtcttcgaccaccacgcactcgtgcggcgccagccccaagcgctcggcgcccagcagataggcgtcgggctgcggtttaccgtgtttaacctgctcggcggtgatgaacaccgccggctgcggcaagccgccggcctggcgacgggcgcccgccaccggcaccgaaccggaggtgacgatcgcccaagggatgccgagcgcgttcaggcgctccagcaatgcaatggcgcccggcagcgcgcgaacgccgtcggtatcctgcgcttccacctgctccagcaattggaattcacgctgaatttccgcttcgctttcgcccggcataaagtggcgcagagaagtaatggcctgtttaccgtgaatgaagtccagcaccgtttgcgggtcgacgccgcggcgctcggcccagtgcgtccaggcgcgctctaccgccggcagcgaatccaccagggtgccatcaagatcgaacagaaaacccttacactccacagaaaacctcttcttaatcaagcattgatgatttgcgctatctcaacggcgctcaaatgatactggcgcgggcaggcctgccaaatcgccagcatacgctgatatttttcccacattttggtctgggcgttaaaaccgtggctgccggaatcaaagtgagtatagcgcccctcggtgctaaccaggaaacgcacgtaactcaggtagcgcgcctcggtcgcggcatcgaaaccgagaaacgccaggcggcgctcgtccagatcctgcttctctttcaggttgccccaggaaacctgcagcgcatgatgcatctccatcacgttgatgatggtgcggcacacctcttcgctcagttcgccgaagtcgcgatccagctcgcgcatttgcaaaccgaagccgcgttcgacgatggtttgcaaccggcgataacgatcgccgttgtccggatcgagcagggtcatcatcttgtactgattcgacaggatcagccgctgggcgttggtcatttccatcaggatttcctcatttctgtgtgatggcgggagcatcgcacagcgcaagaacgcaggaaatcacaactcgaccgttctttgatttaaaccggggttattggcgctttgacgagaaaggccgcatcagcgcggccttttttcatttacagatcgtcgaggaaggttttgtccagctgcttgaaggcgcgcttgagcaaatcagccaacgtctgataggtcggcgtgccttcgagcggcgctaccgcctgcccggcttccgtcagcttgttgcgcacctcatggaaccattgcaacagcgtcggcggcagcggcgtaacagagcggcgccccagccaccacaagccctgcatcggcaggctgcaagcgaacagcgcggtggcgatcgccgggccgagctggccgccgagcgcgatctgccaggtcagcgtgaaaatcgccaacggcggcatgaaacgaatagcgaaacgggtggcacgcgcaacgcggttctccggaaagaccggtgccagacgtttgtctgacggccaggttttcatataatgctgcccgcgctggaagacctgaaaccagcttacggaaccggacggtttgctcgtcattgcgtacctcaacgtcacgtaaagaaactaaaagcgtgctgccagagaccatactaaaaaatttgaagctttaaatttattttgtgtttgcaccgggctatcggtatcctaagccggccttgtggccggtagaagatgacgtaaattttgtcaacttttagccctataaaaatcaagattatttaaaccgcagagaaatcatcggtttttccatcatcctgtgatttgtgcacttcacatgatgttaatcataaatgtcatcggcactatgcgctacgcttgttgtctgattgacgattaattcaccacgtgtgttcgattttcttttaacaacacgactatttaagtaggtacttccatgtcgagtaagctagtactggttcttaactgcggcagttcttctctgaaattcgccatcatcgatgccgttaacggcgacgaattcctctccggtttggccgagtgtttccacctgcctgaagctcgcatcaagtggaaaatggacggcgccaaacacgaagctgccctgggggccggcgctgcacacagcgaagcgctgaacttcattgttaatactattctggcacaaaaaccagagctttccgcgcagctgaccgccatcggccaccgcatcgtgcacggcggcgagaagttcaccgcctccgccgtgatcaacgacgaagttctgcagggtatcaaagattccgtgccgtttgcaccactgcacaacccagctcacctgatcggcatcgcggaagcgctgaaatccttccctcacctggctgacaagaacgttgccgtgttcgacaccgcgttccaccagaccatgccggaagaatcttacctgtacgccctgccgtacagcctgtatcgcgaccacggcgttcgccgctacggcgcacacggcaccagccacttctacgtgactcaggaagccgcgaagatgctgaacaagccggtggaagaagtgaacgtgatcacttgccacctgggcaacggcggttccgtcaccgcagtgcgcaacggccagtgcgttgacacctccatgggtctgaccccgctggaaggcctggtaatgggcacccgcagcggtgacatcgatccggctatcatcttccacctgcacgattctctgggcatgagcgttgatcagatcaacaagatgctgaccaaagaatccggtctgctgggcctgaccgaagtcaccagcgactgccgttacgttgaagacaactacgacagcaaagccgacgccaaacgcgccatggacgtgttctgccaccgtctggccaaatacgtcggcgcctacagcgcgctgatggaaggccgtctggacgcggtgatcttcaccggcggcatcggcgagaacgccggcatggtgcgtgagctgaccctgaacaaactgggcctgctgggcttcgaaatcgaccacgaccgcaacatggccgctcgcttcggcaaatccggcgccatcaccaaagacggcagccgcctggcgctggtgatcccgaccaacgaagagttggtcatcgcgcaggacgcatcccgcctgaccgcgtaatgctctcaaaacaccgtcagcccaggctgacggtgttgttttagcctcatgttaatcgtgaagaggactattctgtgtcacgtactattatgttgatccccaccggcaccagcgtcggcctgaccagcgtcagcctgggtgtcatccgctccatggagcaaaaaggcgttcgtctgagcgtgttcaaacctatcgctcaaccgcgcaccggcgacaacgcactcgaccagaccaccaccatcatccgcagcaactccaccatcccggcggccgaaccgctgcgcatggattacgttgagggcctgctgagctccaaccagcaagacgtgctgatggaggagatcgtggcgcgctaccacgagaacaccaaagacgcggaagtggtgctgatcgaaggcctggtgccgacccgcaaacaccagttcgccaacgcgctgaactacgagatcgccaaaaccctgaacgccgagatcgtcttcgtgctggcgctgggcaacgactccccggcgcagctgaaagagcgcatcgaactggcgcgcaccagcttcggcggcagcaagaacaaaaacatcaccggcgtgatcatcaacaagctgaacgcaccggtcgacgatcagggccgcacccgtcctgacctgtccgaaatcttcgacgactccaccaaggccagcatcgcccatgtcgatcctgcgcagctgttcgccaacagcccgctgccggttctgggctgcgtgccgtggagcttcgatctgatcgccacccgcgccatcgacatggctcgccacctgaaggcccgcgtggtcaacgaaggcgacatcatgacccgccgcgtgaagtccgtgaccttctgtgcgcgcagcattccgcacatgctggaacacttccgcccaggctccctgctggtgacctccgcagaccgtcctgacgtactggtctccgcctgcctggcggcgatgaacggcgtggaaatcggcgctatcctgctgaccggcggctacgccatcgacgagccgatcaagaagctgtgcgaacgcgccttccagaccggcctgccggtgttcatggtcgacaccaacacctggcagacctcgctgagcctgcagagcttcaacctcgaagtgccggcggacgaccaccagcgcatcgagaaagtgcagaactacgtggccagccacatcagcaccgagtggatcgattcgctgaccgccacctccgagcgttcacgccgcctgtctccaccggcgttccgttacgagctgaccgaactggcgcgtaaagccggcaagcgcatcgtgctgccggaaggcgatgagccgcgcaccgtgaaagcggcggccatctgtgccgaacgcggcatcgcggaatgcgtgctgctcggcaacccggacgagatccagcgcgtcgcggcggcgcaaggcgttgagctgggcaaaggcatcgaaatcgtcgatccggtcgccgtgcgtgaaaactacgtgccgcgtctggttgagctgcgcaagagcaagggcatgaccgaagtggtcgcgcgcgagcagttggaagacaacgtggtgctcggcaccctgatgctggaacaaggcgaagtcgacggtctggtctccggcgcggttcacaccaccgccaacaccatccgtccgccgttgcagctgatcaaaaccgcgccgggcagctcgctggtgtcctccgtgttcttcatgctgctgcctgaccaggtactggtctacggcgactgcgcgatcaacccggatccgaccgccgagcagctgtctgaaatcgccatccagtctgcggattccgccgcggccttcggcattgagccgcgcgtagcgatgatctcctactccaccggcaactccggtgcgggcagcgacgtcgagaaagtgcgcgaagcgacccgtctggcgcaggaaaaacgcccggacctgatcatcgacggcccgctgcagtacgacgccgccatcatggccgacgttgccaaatccaaggcgccgaactcaccggtggccggccaggcgaccgtgttcatcttcccggatctgaacaccggcaacaccacctacaaagcggtacagcgttccgctgacctggtctccattgggccgatgctgcaaggcatgcgcaagccggtgaacgacctgtcgcgcggcgcactggttgacgatatcgtctacaccgttgcgctgacggcgatccagtcttcccaggctgacgctgccgccgccaaggcctgatattcttcaggttgaacgataaaaaagcgccggtcattgaccggcgcttttcttttgcgttccctaacgcgccagcaactgcccggcagcctccagaatatgctcggcggtcaggccgtactcctgctgtaaaaacgcctgagtgcccacctggccgtaacgctccttcacccccacgcgccgcatcggcgtcgggcactcctccgccagcacttccgccaccgccgatcccagcccgttatgaatgctgtggttttcacaggtgacgatgcgtccggtcttggccgcgtaggttttgatcagttcacggtcaataggcttgagggtgaacatatcgatcaccgccgcgctgacgccctgccgcgccagcatctccgccgccttcagcgcctccgccaccatgatgccgttggcgatcagcgtgatatcgtcgccgtcgcgcagcaggttgcccttgccgatggtaaagcgcgagccctcctggtagatgcgcgtcgcctgcttgcggatggtacgcacccagtagaagccgcgcagatccatcagctggcgcagaacgtcggcgaacatggtggcgtcggtcacctccagcaccaccgaatgcgccagcccgcgcacgatgcccatgtcttcgaacgacatgtgggtgccgccgttgtggcaggcgctcaccccggcgtcggaagcgatcaccttgacgttgttgcgctggtaatccagcgacatgaacagctgatcgaaacagcggcggctggcgaaggcggtgaaggtgtgcacgaacggcacccggccggtgagcgacagcccggcggcgacgccgatcacgttggcctccatgatgccgcagttgatcacgtgctgcgggtgatccttgtgcacgccgtccatcgccatcgagctcatcaaatccgcctccagcgcgatgatcggcgcgcccgcctcaatctgccgccgcaccgcgccggcgtagactttgcgcatttcgacggtgtcgttttccaactgcgtcactacgttaaacatgggcggcctccagttcggcgatggctttttcgatctccagctgcacgtccggcgtcaggcgcaggtggtgtgagttcgacaggttttccagataggtcacgccctgccccttgatgctgtcgagcacgatcgccagcggccgctgttcaccgccgcgcgccggcgctaccgccgccagcagcgccgcgatgtcgtcgcccttgacagtctgcacctcaaagccgaaggcgcggaacttggcggccagatcgaacggttggatcacctcgtccagcgcgccgtccagctgttgcttgttgtaatcgatgaacagcgtcaggttgttcaggttgtggtgggcgataaactggaacgcctcccagcactgtccttcgttcagctccccgtcgccgaggatgctgaacacccggttgcgccgccccgccagccggtgggacaacgccataccggcggcgatcgacacgccctgccccagcgaacctgtggtagcgtccacgccgcgcgtacgcagccggtccgggtggctcggcagacgcgtgccgttctggttgagggtcttcagttccgccagcgggaagtagcccttgatcgccagcgtgctgtacaacgccgggccggcgtgccctttcgacagcacgaagtcatcgcgctccggccagtccggatccgccggatcgatgcgcatcacgccgccgtacagcaccgccagcgtctccaccaccgacatgcagccgccatagtggccgaagcccagcccggtcagcgctttcagcgtttccaggcggatcgcgcgcgccagggcacgcagctcttcaatttccgtttcgctcgttgtgtcgttcatcagtctgccctcgttatttctcgacgcggtcagcggccggcgcgcctttgcgttttcccaggaagttatgcgccaccagcagcgcgaacacggcgacgatcgccagcatgatcatctccttcgacataaagcgcgccatattgcccagcaggatgccgatcgcgccgaagtcggcgtcggagaaggtggtgttggcaaacccaagtgcccccaacaccggcagcagcagcaccggcaggaaggtgatcagcagcccgttggcaaaggcacccagcatcgcgccacgccgcccgccggtcgcgttgccgaacaccccggcggtagcgccggtgaagaaatgcggcaccacgccgggcaggatcagcaccatcttcagttgccccagcaggaacagcccggccaacccgccaaggaagctgaacaggaagccgatcagcaccgcgttgggggcatagggataaaccaccgggcaatccaacgccggccgcgcgttaggcaccagtttttccgagaagccggtgaacgccggcacgatctccgccagaatcaagcgcacgccctgcagaatgatgaacaccccggcggcgaaggtgatggcctggataatcgaatacaccaggtagttctggccgccgctgagctcgctttccacataggcccgcccggcgcagatcgccaggatcaggtagatgacgatcatggtcatcgagatcgaaatggaactgtcgcgcaggaagctgagatttttcggcaggttcatctcctcggttgagcgcgaatttttgcccaccttcgagccgatccaaccggacagcacatagcccagggtgccaaagtggccgaaagcgatatcgtcgttgccggtgatgcggcgcatatagcgctgggcaatcgccgggaagaacgccatcaccagccccagggtcaacgcgccggtaaacaccagctgcacgccctcgaagcctgccaccgtcaggatgatgccgatcatgcaggccatgtagaaggtgtggtggccggtgaggaagatgtatttcagccgggtgaagcgcgccaccacgatgttcgccaccatgccgaacgccatgatcaaggcggtggaagcgccgtatttctccagcgcgatagagacgatcgcttcgttgttaggaatgatgccctgaatattaaacgcgtgttcgaacatgccgcccaacggattgagcgacccgaccaataccgtggcgccgccgcccaacacgataaagccgagaatggtttttaccgtgcctttcaccacgtcggaaaaggatttcttttgcgccagcaaaccgatcagcgcaataagcccgaccagcaccgaaggcacctttaatatatccaccacaaacttgagcgtttcctggataaacatatccacctcgccaatcgttttattcagaggattgagtgggcttcgaagtaagcgcgcagcttggcttccagctcattgatgtcgatgatgttgctgatcaccaccagctgctcggccggcacgctggcgctgtcggcaatgtcttttgccatcacgaacacgtcggccgcgccgggagtggcggacgacagatcggagtgttcaacctcggcctccacccccatctttttcagcacctttttaatgttcatttccaccataaagctgctgccgagacctgaaccgcaaatcgccatgattttcatgatatccacctgttgaatttagcgtgtagggtagcgccgccggtcatattcccggcgttgttagcattaataatgttcctggtgattaaacgttaatagcgggcgataatatcctcgatttgccgtttatctttggcgtgaaataacgcctccatggcctggttatcggaaaataattccgccagttgcgaaatcaattcgatgtggctgttgctgtcgggtgcggaaagcatcaccaccacctgaaccggatcgttatccgcggaatgaaagttcaccccctgatggatcttcaacagcgataaccccagcgcgttggcgcccagctccggccgggcgtgtggcatggcgatgcccggcgccaggacgaagtaagggccgagcttctcctgctgatgaaagatggccgtcaggtaattcggcgtaatcacaccgtcttgcagcagcggctgcgcgctcagcgttaccgcctggcgccagtcctccacccgttcgcacagctgtatatgatcggcggtcagccactctttcagcacgttatcctcccgagagtcgatgattgcggccggtgattaattcaccggcgacggtaaaactttaatcaacccctcctggccacacagtgatggatatcacaaagatagcgctaccaaagcgctatcatgcagatctgtgatagcgctatcaaaacgccgtgctgcggtatgacgttaaccacaattttttctcgctctttcgggtaacggggtagaatgtgccgcatacggggatcgtcgaagccgcgccgtcggcttcccaccctcaccatttttatgcgccgcgcgcgcatttcagtcgggatttggcatgtcgatcggtaaaaaacgacgcagcacgggcagggtgacgttggctgatgtagcgcagctggcgggcgtcggcaccatgacggtgtcgcgcgcgctgcgcacgccggagcaggtttcagacaaactgcgcgagaagattgaagccgcggtgagcgagttggggtatctgcccaacctggccgccagttcgctggcgtcggcctcctcctacaccatcgccatggtggtgcccagcctgtccgaatccggctgcgccgagatgttcgccggcctgcagaaagtgctgcagcccgctggctatcacatcatgctggcggagtcgcagcaccacctggaacgcgaggagaaactgctggagaccctgctctcttacaacctggcggcggcggtgctgctcagcgtcgagcattcgcaaaatgcccgcaacgcgttgatcgccgccaacattccggtggtggagatcggcgccgtgcgcgccgatccgatcgacatgagcatcggcatcgattacgtggcggccatgtatcagctgacgcaaacagtgatcgccagcggctatcagaatatcgggctgctgtgcgccaatcaggaacagtggattttccagcagcacctgcagggctggcacaaggcgctgctgcgcaaccatatgtcgccgcatcgggtgatcaacgccgcacagcccgccagcttcagcaccggcgcacagcagctgccggaatttttgctggcctggccggagctggacgcgctggtgtgcgcctcggacgaactggcgggcggcgcgctgtatgaatgccagcggcggcgcatcaaggtgccggacaatctggcggtggtggggttcggcaacagcgagttcagccgggtgtgccagccgccgctgaccaccatgaccattccgcatcgcgatatcggcattcaggccggccaggcgctgctggcgcggctgaacgagcaaccctggcagccggcaggttccctgcccgccacgctgtgccgccgtgacagctgctgaatccacagcataaaaaaagccggtcgatgaccggctttctcacgcgttggcgtctcagtggttgtcgagcggcttaccgtaatcctgttcgttgttgcgcgtcagccacagcgacagcgccttcagcgaatccggggtaaattcgtcgcagcgcgcggtgatctcttccggcgtcagccagcacacttcagccacttcttcttcctgcagcgcgaacgggccgtgcgacacacagctgaacagcgcgccccacacccggcactgctcttcttcgaagtagaacagaccgtgttcggcgaaaggcacgccggcgatgcccagctcctcttccgcctcgcggcgcgccgagtccagcacgttttcaccgctttgcactacgccgcccgccgtcgcgtccagccagcccgggtagaagtccttgatctcggtgcgacgctgcaccagaatttttcccatcccatcatgcaccacaatataggtagcacgatgacgcagccgctccgcccgcatctgttgacgactggattgcgcaatcacctcgttttgctcgtcgacgatatcaacccattcggtatctgcagcctgaccctgttccgccatcctctaaaaccttctattttggcgcgatgcatcccgcgcgctggttaatcaatgagtgtttttcaaagatttttattgtgtgtgtataaattagtgcgtttagcgtgttaacgccacctccgcgacgaccttgccgtcgtcgagcgccagcacgcgcaaagtgccccgatccaacatgccgtagctggccggaaagccccctttcgggatgctgaccgagcccggattgaagcaatagatctcaccctgccgctccgcctgcggcagatgcgtatggccgtaggccaggacgtcaccgcgggataacggcggcagtgtcgagggatgataaaggtgaccgtgggtcaaaaacaatcgtcttttttgcagtaaaacctgttgccagggcgcctcgatagggaacgtcagcagcatctgatcgacctcgctgtcgcaattgccgcgaacggcgatgatcttgtcgctatagcggttcaatcgttcggcaacctgagcgggctgatacccggccggcagcgcgttgcgcgggccgtgattcagcaaatcgcccagaagaatcagccagtcggcgccctgttgtgcgaacaattccagcacacgttcggtagccggcagcgatccgtggatatccgaggcgaacatcagcttcataaccttgtcctatagagggaaataagcgccattttaccgcgccggcgccgtgcggcaaaccgccgcccgccccggtgtagaattgtgatccaactgcgcagatagcatcggacgaatcccacatagcctgctatccttagctgctattgttggatctctgatatacctttgtgcgcggcgaagaccgcagcaacgtgtaatgaattacagatcaccttaccgcaggaggcaacatgattgacctgtattacgcgcctactcccaatggtcacaagatcaccttgtttctggaagaggtcggcttgccctaccgtatccatcgcgtaaacatcagcgccggcgagcagttcaaaccggactttctgagcatttctcccaacaacaaaatcccggcgattgtcgatcagcaaccggtggacggcggcgcgccaatcagcctgttcgagtccggggaaatcctgctgtatctggcggagaagaccggcaagctgctgagcaagggcctgcgcgaacgcgccgccaccctgcagtggctgttctggcaggtggccgggttcgggccgatgctcgggcagaatcaccactttaaccactacgcgccgcagccggtgccttacgccatcgagcgttaccatctggaaaccaaacggctgtacggcgtgctggacgctgaactgcaaaaacacccgtacctgggcggcgataactacagcatcgcggatatcgccacctacccgtgggtggtgtcgcatccgcgccagcgcatcgatctggcagattacccggcggtgcgcaactggttcgagcgcatcagcaaccgcccggcgaccgagcgcgcctacaaactggccgaacaagcctaagcgcctcctccgactccccgtcggccggggagtcacatcgtcctcacgttatcatttccttactttccgtgtattctgaacgctaataatcagacctatggagaatctctgatgtctttcagtcaacccgacgccgttattcgcattaaaaatctgcggctgcgcacgttcatcggtatcaaggaagaggaaatcaacaaccggcaggacgtgctgatcaacgtggtgatccactacccggcggacaaggcgcgcaacagcgaagacatcgccgacgcgctcaactaccgcaccatcaccaaagcgatcatccgccatgtggaagataaccgtttcgcgttgctggaaaaattaacgcaggatgtgctcgacatcgtaaaagaacacgcctgggtaacctatgctgaagtggagatagataaacttctggctctgcgctacgccgattcggtctccatgaccatgagctaccgccggggctaactcagggaggtagaccatgcggatcctgatcaccggcgcaacgggattgataggcagcagcctgacggcaagactgctggcgctttctcaccacattacggtactgacccgcgacgagcggcgcgcccgagccaggctcggcgatcggccgagctattggcgaacgctggacgaccggcagtcgctggatgacttcgacgcggtgatcaacctggccggcgaacctatcgccgacaagcgctggagcgcgcagcagaaagagcgcctgtgccgcagccgctgggatctgaccgaacgcctggcgcagctgatcaaggccggcagcacgccgcccggcgtgctgatttccggttccgccgtcggctactacggcgatcaggggcaggcggtggtcaccgaagaggagccgccgcacgacgaattcacccaccagctgtgccagcgctgggaaacgctggcgctgcaggcgcagagcgacgccacccgcgtctgcctgctgcgcaccggcgtggtgctggcgccacaaggcggcgcgctggccaaaatgctgccgccgttccgcttcggactgggcggcccgatcggcgacggccgccaatatctgccgtggatccatctcgacgacatggtcaacggcattatttatctgctggatcacgccaccctgagcggcccgttcaacatggtggctccttacccggtgcataacgagcaattcgccgcccaattggccaacgtgctcgatcgcccggcgtttctgcgggtgccggcgttcgtcatgcgtttgttgatgggggaagcggcggtgctggtgctcggcggccagcgggcggtgccgaagcgcctggaagaagccggcttccacttccgctatctggagttggaacaggcgttggatgacgttgtcaatcagcgggccgaagcccgctgatctgaggttacttcaacgcgccggacaggaactgctgcaggcgcgggcttttggggttgccgaacagctcggccggcggcccctgttcttcaatcaaccctttgtgcaggaagatcacgtggttggaaacgtggcgcgcaaactccatttcgtgcgtcaccaccaccatggtcttcccctcctccgccagcttctgcatgatgcgcagcacctcgcccaccagttcgggatccagcgccgacgtcggttcgtcaaacagcagcacctccggctccatcgccaatgcgcgggcgatagagacgcgctgctgctgaccgcccgacaggtgcaccgggtatttgccgcgcgcccgctcgtcgatgcccactttgtccaggtagcgcaccgcgcgctcgtgcgcgtcggccttgctcagccccagcacctgcaccggcgcttccatcacgttctccagcaccgtcatgtggctccacaggttaaagtgctggaacaccatggtcaggcgggtgcgcagcagctgcagctgcttcttgtcgaataccttcagctggccgtccttgtcgcgcaccatgcgaatatcttcgttgttcagactgatcgaaccttcgctcggcttctcaaggaagttgatgcagcgcagaaaggtgcttttgccggagccggatgagccgatgatgctgatcacatccccggcgttggccgccagcgagacgcccttcagcacttcgtggtcgccatagcgtttgtgcagttccgtgacggctaatttattctcagacatggttttcttcccgtcatttatcagtgactaacgtgtgccatccagcgtttctcagctttgcggaacaggctgattaacacgtaggagatgatcagatacagcaccgccgcgatgccgaaggcgtagaacggctgataggtcgcggcgttgatgtcgcgcgcgatcttcagcagatccggcacggtggcggtaaacgccagcgcggtggaatgcagcatcaggatcacctcgttgctgtaagccggcagcgcggtgcgcagcgccgaaggcaaaatgatgcagcgatacatcttgaagcgcgagaaaccgtaggcgttggcggcctcgatttcaccgtgcggcaccgagcggatcgccccggcgaagatctcggtggtataagcgcaggtgttgagcgtcagcgccaggatggtgcagttgagcccgctgcggaaaaacgcattgagaaactcgctgccgcgcacgatctcgaggctgtacatgccggagtagaacaccagcagctgcacgtacagcggcgtaccgcgaaacacataggtgtagagccacaccgggaaacgcacccagcgaagggaagacacgcgcgccaccgccatcgggatcgccagcagcccgcccatcaccactgaagcgatcagcagccacagcgtgatcgccacgccggtaaagcggtagccgtcgctccacagcagcgactgccagtactgttgcaggatatcgatcatagctcggccctcttgacgcccagtgagtaacgccgttcaagccacagcagcacgccgttggaaacggtagtgaagaccagatacaccacgccggccacgatggcgaagaagaacggctgataggtgcctttccccgccagctgcgtggctttgaccacgtcgttcaggccgagaatcgacaccagcgccgtcgccttcaggatcacctgccagttgttgccgatgcccggcagggcaaaacgcatcatcgccgggaacagaatgcgccggaagatctgcgcgccgctgaagccataggccgtcgccgcttcgatctgccctttcggcaccgccagataagcgccgcggaaggtctcggtaaaataagcgccgtagataaagccgagggttatgatgccggcgccgagcggatcgatatcgatctgcgcgaagcccagcagcgtagtgatattgttcagcgcgatttgcagaccataaaagatcagcagcatcagcaccagatcgggcacgccgcggatcagcgtggtataggcgccgaacaggccggagataaaggggttatgagacagtttgccaccggcgccgatcaggccgatcaccaccgccagcagcacggaactgagggccagctccagcgtcaccagagccccctcgaaaatcagttgggaatagccttgcagcatctacttcaccctgtggtctaggatccgaaccatcggggccggcacgccggccccacagtcacagcatggaacggtaagcggattacccgccatagacgtcaaagtcgaagtactttttcgcgtatttgtcgtaggtgccgtctttgcgcatctcggcgaaagctttgtccagcgccgccttcagctcggtatcggtcttgcgcagccccatgccggtgccgacgccgaagaacttgtcatccttcaccgattcgccggcgaacgcatagtctttgcccggcggctgtttcaggaagccgtcgctgcccgccacttcatcctggaaggcggcgtcgatacgcccggaagccaaatcggcgtaaaccagatcctggttctggtaaggcacgacggtgatgcccttcggctgccacatggcgttggcgtaggcttcctgggtagtgccctgcaacacgcccacgctcttgcctttcagggcgtccacggtaggcaacagcttggatcctttcggcgcgatcagacgcgcgttggcggcatacagcttgtcggtaaaggcgatttcctgctggcgtttttcggtgatggacagcgaagagatgatagcgtcgattttcttcgccttgagggatgggatcagcgcgtcgaagtcgctctccacgaaggtgcattgggtattgatgcgtttgcacagctctttggccaaatcgatgtcaaagccaaccaattcgcctttggcgtttttggattcaaacggtgcgtaagtcggatcggtgccaatcttcagcgtggaaggaatggcggcaaaggcgctgctggcggcgctcaaagccagaactaacggcaaaatcaaaacccgctttttcataaattaccctcaaattgatttttttgatgccactacgggcattacttttccccaccaaatcaatttgcagtaatcgtgccacattaggtgctacgggcggagggaacggctccggccttcacaatactgtttcctgggacgataaccgcaaaattaaatcggccgctcggggccgcgccactggcagccgcgataaggcggcgccatgaaacagtgaacgtgatgaagtgggatcattatggtgcatgcgccgccctaattcagtgcggtgttgcacaaatgtaccaatttggggatgaaaatgttaatcagcgccctgccagcgggtgaacagatcggccggcagttcgatatcaaactgatcgatcacccgattgacggtctgatcgatgatgtcttccacgcttttcggctggtggtaaaacgccggcaccggcggcatgatcaccgcccccatctccgccgcctgcgtcatcagccgcaggtgcccaaggtgcagcggcgtttcccgcacgcacagcaccaaacggcggcgctctttgagcaccacgtcggcggcgcgggtcagcagcccgtcgctgtagctgttgacgatgccggacagggttttgatcgaacatggcaggatcgccatacccagggttttgaaagagccggaggagatggcggcggcgatatcgcgcgcatcgtgcaccacgtcggccagcgcctgcacttcacgcaggctgtacggcgtttccagcgccagcgtctgccgtgcagcgttgctcatcaccagatgggtttccacctctgcgacgtcgcgcaaaacctgtaacaggcgcacgccgtagatcgcgccgctggcgccggaaatgccgatgatgagtcgtttcatggaaaatggcctctgccgtaaaaagtaagatcaggcagactttgccgcaatggcgagggataagcaagttcacaggagcaaggcgcaccgccgcagacgcggcgatgccccccgagtaatcaacgcggccggttagccttcgttgtgcagttccagattttccgcttcggtttgccctcgcagcgccttggcgtcgtcgctgcgcagcgactccaggtattccagatagctttgatcgacgtctttggtcacgtagatgccgttgaataccgagcattcgaactgggtgatgtccgggttctcttcgcgcaccgcttcgatcagatcgtccaggtcctggaagatcagcccgtcggcgccgatgatctggcggatttcatccacttcacgcccgtgggcgatcagttcgttggcgctcggcatgtcgatgccgtagacgttagggaaacgcacttccggcgcggcggaagccagatagacgcgcttggcgcccgcttcgcgcgccatttcgacgatctgctccgaagtggtgccgcgcacgatggagtcatccaccagcagcacgttcttgtcgcggaattcggcgcggttggcgttcagcttgcggcgcaccgactgacggcgcgcctgctggcccggcatgatgaaggtgcggccgacgtagcggttcttcacaaagccctggcggtagggcttctcgagaatacgcgcgatctccagcgcgatatcgcaggaggtttccgggatcgggatcaccacgtcgatgtccagatcttcccattcgcgggcaatcttctcacccagcttctggcccatgcgcacgcgggcgctgtagaccgagatcttgtccataaaggagtccgggcgagcgaaatagacgtattcaaacaggcacgggttggttttcgggttctctgcgcactggcgggtgaacagctggcccttggtggtgatgtacaccgcttcgcccggcgccacatcgcgcaggaactcaaagcccagggtatccagcgccacgctctcggaagccaccatgtactcgctgcggccatcctccagcgtgcgcttgccgatcaccagcgggcgaatgccgttcggatcgcggaacgccagcaggccatggccgatgatcatcgccacgcaggcgtaagcgccgcgcagttgctgatgcatggcggcgaccgcggtaaagatgttgtcggcctccagcgggtagtgcgggaagcgatccagctcgctggccagcacgttcagcaggatttccgagtcggaggtggtgttgacatggcggcggccgctttcgaacagcttttggcgcagctcatgggcgttggtcaggttgccgttgtgggccagcgtaatgccgaacggcgagttgacgtagaaaggctgggcctcagaggcgctcgagctgccggccgtcgggtaacgcacatggccaatgcccatgttgccctgcaagcgttgcatatggcgcgcctcaaacacatctttcaccaggccgttggctttacgcaaacggaacccgttgtgggcgtcaatggtgacgatgcctgcggcatcctggccacggtgctgaagcaccgtcagcgcatcataaatcgactggtttaccggcatgaaaccggcgataccgacaataccgcacatgttgtcttttcctcatcagcgctaccgccccggcaattgggtcggcaagaaactcgacgtgctctgcaggtagtcaaagaaccacctgatgacgtaactgaactggggaatgagctgcgactgtttccagtcggcactctgtgaaaagccggtaaaggtatccaggaagaacaggatcgccgcgacgatcaatactccgcgcagcgcgccgaagcagatgcccaacacccggtcggtgcccgacaacccggttttctctaccagagagctaatcacatagttaacaatagcccctacgatcaaggtcgcgatgaacaaaatcgcgatcgcgatgccgtttcgcaccagttcatcttcaaaacgagtgaaatagaccgcaaggtaagagtagaaatggctggcaacaaaaaacgcacatccccatgtcacaagtgacaatgcttcgcgaacaaaccctcggatcaggctcaccagagccgaaaatccaatcaccgctataatgacgtaatcaatccagaccatgaactattccaatgatgaatcgcccctgcatccaattcgcggcgaattctaacagaaaaagaaaacgtttgcgtaggggatttcctaccacgttacaaataaaaagcggcgatcaaaaaattcccaatcgccgcgcctacataggtgatttcgcctgtaaaaggcgcggtttttctcgctttctctccaccactccttaattcaggggcgcatcgtgctgcgcccctgcggggtttaacggccgtacggcttcacctgcccgctcagcccgctgatcgagttcagcgacggcagcgccgcctgcagcttctgcttggaggcatccgggccgacgtagatacgggtgatctgcccctgcaccggcgttgacggcacggtaaaggcgcgatagcccgagaggcgcagcgaggcgacaatctcgttcgccttggcggcatttttcaacgccccgagctgcacgacgtaggcttgcccggccggcgctttttcttccgccggtttcggctgcggcgtcggttcaggtttcggcgtcggctccggcttcggtaccggcttcacttccaccggtttcggttgcggcgccggtttcggtttcacttccaccggtttggtttctaccggtttcggcttgggctgcggcaccggctgaggacgcgtttcgaccggcggcggcgccacctgcgccggctgctgagcaccttgccgcaccgcctgttgcgccgccgcttcattggccgcctgctgttcgaccagcgcgcccgccccttccggcggctgcgccggcaacggttgcgtcaccggtggcagcacgtcgttctcttcgacgtcgcccgccttcggcaccaacggaatggccgcgaattcatcctcgtaatgcttctttttaccgtccagcaaccctggcaggatgatcacccccagcgccaccagaatcacggttccgaccagtcggttctgaaatttactcgccactcacactccccgcatctcgtctgacgccgccatcacctgcgccacggtgtggaacgatccacagacgatcacaatatcctgtttatcagcatcctgcatagcctgccgccaggcagtttcgacatcattaaagcgtcgcggttccgccagatgttgcgccagctgttcgacgctggcgccgcgcggcccgtcgagcggcgcgcagtaccattcatccacctgctcgctgaggcaggccagcgtgccggcgatatccttgtccgacagcatgcccaccaccgcgcgcaccttgccgccgttgcgcggcagtttggccagacgcccggcgagatagccggcggcgtgcggattgtgcgccacatcgaggatcagcgtcggctcacgccgcacgatctggaagcgccccggcagcgtcgcctgctgcagcccggtgaaaatcgcgcgttcgtcgatttccagtggagaacagttgagcgccgccagcgcggtagcggcgttggccagcggtacgttcggcgtcggcagatcggtcagcagcgtgtcgccgccctgccactgccagcgatcgccctgctcgctgaagcgccaggcttcgccgcggcgagacagcggcgcgcccagcgtttcggcaacctgacgaatgctgtccggcatgtcgggttcaccgaccaccgccggtttgccgctgcggaaaatgccggccttttcacggccgatgctttcgcgatcgttgcccagccagtcggtgtgatcgagcgcgatgctggtgatcaccgccacgctcggatcgacgatgttggtggcgtcgaggcgcccgcccaggcccacttccaggatcaccacgtcgagccgcgcctgtttgaacagctgcagcgccgacagggtgccgaattcgaaataggtcagcgacgtttcgccgcggccggcttcaatggcggcgaacgagcggctgtgctccgcttcgctcagctcttccccctgaatgcgcacgcgttcggtatagcgtaccagatgcggcgaactgtagacgccgacgcgcaggccggcggccagcagaatcgcttcaagggtgcgacaggtggtgcctttgccattggtgccggcaacggtgaacaccgtgggtgcgggggtcagtaaatccagatgcgccgcgacgcgctgtacgcgctcaaggccgagttcgatcgcctggctgtgcagacgttccagataataaagccacgagctcaatggcgacgtggcttggggaatttggtggttttgcatgagtcccatcactgaacttgggttcattaatccatcagggcaccaccctcaccgcggtaaaggcgatgcgcttcgtcactgccgccagcctgccaaccgcagcggataggctacggccggcggagagcgggcatcagccgtcacttagccacaaagtggcggctgaacccgggcgggatctgtctttgcctcaggcgtcggcctgctgctccggctcaatgaccggcgcggcctcatcgaaatgcggctgcggctggttggtcagcttggacagaatgctcgccaacgtttggcgcatttccggacggcgaacgatcatgtcgatcgcgcctttttcgatcaggaactcgctgcgctggaagcctggtggcagtttctcgcgcacggtttgctcgataacgcgcgggccggcaaaaccgatcagcgctttcggctcggcgatgttgatatcgcccagcatcgccaggctggcggagacaccgcccatggtcgggtcggtcagcacggagatatacggcaagccgcgctcctgcattttggccaacgccgcgctggttttcgccatctgcatcagcgacatcagcgcttcctgcatacgcgcgccgccgctggcggagaagcacaccagcggacagttgtcctccagcgcctgctcaaccgcacgcacgaaacgcgcgccgaccacggaagacatagagccgccgatgaaggcgaattcgaaggacgcggcgacgatcggcataccgtacagcgtgcccttcatcaccaccagcgcgtctttctcgccggtcgctttctgtgcggcgaccagacgatctttatagcgcttggaatccttgaatttcagaacgtccttcggctccagatcgctgcccagctccacttcgctgccttcgtccagcagggtatgcagacgcgcgcgcgcgcccatacgcatgtggtggtcgcacttcgggcacacttccagattccgctccagctcggcgcggtagagaacctggccgcagctgtcgcatttagtccagaccccttcaggaatgctcgccttacgggtttgtgtgatgttgctcttgttaagaattcgttcaatccagctcatcgatgacctttctgtttgaacctggcacacgccagtccgctgttcatgctttaacaatccccccgaaaacaccccaatgaaaaaatgcccgttcgcggcgcggcaagcgcggcgactgaggcatcggcttcagggttgttcgcaggaacagaccataatgtcgctcattaaaccatatcggcccgacgctgtggacaaaaaactggtcgaaccgacaggttaagcgatgtttttactgtttttgctggcgggcggccgcgcgcttgtggcgccaaatttcaatcacccccggcagaatcgaaacgatgatgatcccgacgatcaacagtttcaggttctcctgcaccaccggcagatcgccgaacaggtagccagcataagtgaagagcagcacccaaaccagtgcgccaatcacgttgtaggcggcgaagtggcgataggacatatgccccataccggcgacgaacggcgcaaaagtacgcacgatcggcacgaatcgcgccagaataatcgttttcccgccgtgcttctcataaaactgatgcgttttatccaggtagctgcggcggaagattttcgaattcgggttgctgaacagcttctcgccgaacaaccgcccgatagtgtagttcaccgcatcgccgatgatcgccgccacggccatcaacgccaccatggtgtgcacgttcagatcgttggtcggcaacgccgccaacgcaccggcgacgaacagcaaagaatcccccggcaggaacggcgtcaccaccagaccggtttcacaaaacaggatcaggaacagaatagcgtagacccacatgccgtattgtgcgaccagttcggccaggtgcacatcaatatgcagaatgaaatcaataataaacttgatgatgtccataaattctctcattgatgccgggcgtttcaatcacccggcagaagcacaagggagcgacgctttcaggcgtgccggcgtttaatcgtcgggcaaaaacagcggccccatcggcggccgcggcagaccaaagtggtcagggtaatccacggcaaccagatacagcccctcggctcgcgccgtcgccgccgccagattgcgatccttcagtgccagcaactcggccatccagttctcatcctgattgccgcagccgatctccatcaggctgccgacgatgttgcgaaccatgtgatgcacgaaggcattcgccttgatatctaccacaatatattcgccgtagcgcgtaaccttaacgtgttttacgcagcgccacggggtgcgcgactggcattgcaccgcgcggaacgacgtgaaatcgttctcgcccagcagcgcctgcgccgcccgatgcatgcgatcggcgtccagcgggtgataaaaatgcgttaccccctgctgcagcaccgccggccggtagcgatggttgaaaatgatatagcggtagcggcgcgcggtggcgctgaaacgcgcgtgaaaatcgtcggcaacggggctcacccaacgcaccgcgatatccggcggcaaatgggtattcacccccatcgtccaggcggcgtccttgcggcgcgcggtagtttcgaaatgcaccacctgcccggtggcgtgcaccccggcgtcggtacgcccggcgcacagcacggtaatcggcgcatccgccaccttgctcaacgcctgctccaggcgttcctgcacgctggccacttcttgctgccgctgccagccgtaataacggctgccatcatattcgatgcccagcgctaccttcagcgtcggctgagcgggcgagaccacctcagacatcagtacatctgctcctgcaccagacgctcggcggtttcgacagccatcaacgcgccgccgaagcgcacgttgtccgccaccgtccagaactgcagcagctcggggatgccgtaatcgttacgcaggcagccgatgctgagcgcatcgctgccggaagcgtcggtgacctgggtcgggtaatcgtcctcttcgctcagctgaatatcttcgacctcttcgagctcgctgcgcgcctcttcggcggacagcgggcgcagcgcttccaggtgcaccacctgcgcgtggccataaaacaccggcgactgaacgcagctcaccgaaatcggcagcccttcatcctgcagcaccttgcgcacctgatcgacgatcaggcgctcttcgcgcacgctgccctgctcgtcggcgacaagcggcagcaggttgaacgccagctgtttaccgaaaacgccttcctcggccggaatgccgttcagcagacgcgcgctctggccggccagatcgtccaccgccaccttgccgcgcgacgataccgacatcagcgtggtgacgtgcagacgcgacagccccgcctgttcggtcagcggtttgatcgccgtcagcagttggctgaccatgctgtcggccaccgccacgatattgcggttacggtaatccgccagcacctgcgggttcacgcccggcaccaccagcggcacatccggctccatggcgaacaggccgctggtgtcgatcaccaggcagcccatgttgccggcttcttcggcatagcgcgcggaagcgtcgctgccggcgacgaagaaggccagctgcgcctgcgaccagtcgaactcttcggcgttttgcaccagaagagacttgccgttgaagcgcacattggcgcccgcgctgcgttcgcttgccagaggatagagctcacccaccgggaactggcgttcctgcaacaattccagcaacgcttcacctaccgcgccagtggcgccgagcagcgcgatattccagccgtcagacatcgggttttctccagagtatttcattcataaaagcacacgggcagtgcaatcaccgcccgataatctttaccgctcactgtagcggcgttggcttaagacaaccttacgccctacgccacgctgaagcccagcttgccgagcagctcggcgctggcgctgtcatcgcattgcacggccagcgaagaccactcgcggcgctcctggtagtgcttgcgcaggcgatcgaattcgcccggttgcccggcgactttgcgcaatggcgcatcatcgcggcgcacatcatacaccaagtgcatcaatcgttttaaccgcgcttcatccagcggcccgttgaggcggatctggctgaactccggcaccggcagcagcgaggccagcgccacctgctgcggctgccccagatggcggctgaacgcttcgaacacctgggtggtgccgcgcgccttgccttccagcgtatacccggcgatgtgcgcggtgccgatatccacccgcgccagcagcggcaaggcgaggtccggctccggttcccacacgtccagcaccgtgctcagctttttgcccttttccagcgcctgcagtagcgcggcgttatccaccaccggcccgcggcaggcgttgatcagaatgcggttgtccggcagcgccgccagcaggtcggcatccgccagatgcagcgaatggtatggcccggatttattcagcggcgtatggaaggtcagcacatcggcctcggccaccagcttctccaacggccagaactccccggcgtcgccgcgatcggcgcgcggcggatcgcacagcagcgtgcgcacgcccaacgctttgaggcgcgcgtccaggcgggaaccgacgttgcccacgccgacgatgccgacggttttatcccgcagctggaagccgtcgcgttcggccagcagcatcaaggcggagaacacatactcgaccaccgcgatggcgttgcagcccggcgcggcggaaaacccgatgccctgccgttgcagccaggcgtcatcgatgtgatcggtgccggcggtggcggggccgacaaagccgatgcggctgccggccaacagggcttcattgaccttggtgaccgaacgcaccatcagcgcatcggcatccgccagcgcctcaagcgggatcggacgccccggcaccgcctgcacgtcgcccaggcggctgaacagctcggccgcgtacggcatattttcatcaaccagaattttcactgcgttctccgacggtttacggctattggtctgcgaaatagtgtgccactgaatcaggcacggcgaaagcgctcaggggtggtgccggcgatctgctggaacatgacgataaaggccgacgcggagctgtagccgacatccaacgccacgtcctgcacggttttgccctgctcgagcaacgacacggcatgcagaaaacgcaggcgctggcgccactcgctgaacgacatgcccagatcctgctggcagcggcgcgacagcgtgcgctcggtggtgtagacccgcgccgcccacgttgccagcgaggtgttgtccgccgggcaatgctccagcgcttccagcaccggcgccaaaaatttgtcgtctgacgacggcagataggtttgctgacgcggcgacaggcgcagctggtcgatcagcacctgacagaggcgcaaatcctcctccgcctgcggaatgtactgcttgcgcgcatagaaatcctcggcgatggcacggaagatgggcgttacgctcaccagacaggggtcggccggcatgccggcgcacagcgccggcgtaatgtccaccatgcggcactgcgccagtcgctggttgtagcaggagtgttcgatgcccgccggcgcccacaacacgaactccggcggcgccagaaagcgctgcccgcctatgcgcagcaccatcaccccggctttgacccacatcaactggccccaggtgtggctgtgcggctggaattcggtgcgcgcgttaaactcttcacagcggaactgcaccgggttgggcgccgggatcagcgactcagggaaatggcggatttctggcatggtttcgtcccgtgatttgtcttgtttacgccgatttttgtctggatatcgctatatatgataaaccggacacgcgtagactagccagcatgttggacgttattgagaataattatcatgaatatgctcttcccactgttggccgtgctgatatggtcgattaacgccgttgtcagcaaactctccgccaccgccatcgatccggcggccatttcactttaccgctggctgctggcgctgatcgccctgacgccgttcgtgctgccgggcgtgctgcgcaattgggcgcaggtgcgcgccaactggtggaaactaatgatcctcggcttgctgggcatggtgctgtatcaaagcctggcctattacgcggcgcacagcgtcagcgcgctgtttatgggcatcatcgtgtcgctgatcccgctgctgaccatcctgatcagcatcgtcctgctgcgcattgcgccgaccgtcggcgtgctgctcggcagtattctctccttcggcggtttgatctggctggtcagcggcggccagcccggcgtgctgctgcagcacggtatcggcaagggggaattgatgatgctgctcgccaccgcctcttacgcgctgtatggcgtgttgaccaaacgctgggccatcgcgctgccgaactggcaatcgctgtacgtgcagatcctgttcggcgtgctgctgctgctgcctaatttcctgatggcgcaggatgtcggcttgaacggccataacctgccgctggtgctgttcgccggcattccggcttcgatcatcgccccgttcctgtggatccagggcgtgatgcgcctgggcgccaacaccgcctcgatcttcatgaacctggcgccggtgtttaccgccgctatcgccgtgctgttcctgcatgagcagttgcacggttatcacctgatcggcggcggcattaccctgctgggcgttatcctgtcgcagcggctgcgcacgccgctgacgcgtaaagccaaagccccggcggccgacgtcgagtcctgcaaagaacaggcttaaggcaacagcctgaaacgcacccgcaccaacagaccgcccagcgcggcggagctcaacagctccgggcgggtgccgtgataggcggtgatgtccttcaccagcgccagccccaggccggcgcccggctgatcgcccacgttgtccagccggtgaaatggctgcagcgccagcgccttgtcctgcaaggcgatgccggggccgctgtcttcaatctccagcacgccttcccccgtcgccttctcctgcgtgaggcgagcggtgaccacgccctgacgcggtgtgtatttcaacgcgttgtccaacaggttggcgcacagctcggccaacagcagcggttcccccgccacctgacacgccgcttcaccttcgaagccgagatcgatctgtttgctgcgcgcctgcggcaagcgggaaaaacaggcgtcgcgcagcacctgcgccaggttgaccggctgcagcttgcgctcggcctggtgctcgctggccttcaggcgtgagagatacagcaggcggtcggtcagtgccacggtattgtccagcgtcgcgctcatcgcctgcaggctttcgcgccactgctgcggccgatcgctggccagcgccaccccgacctgagtcttcaacaccgccagcggcgtgcgcagctggtgggaagcgtcggcgctgaaacgttcctgacgcgccaccatcagccgcagccgttcgatatagcgattgaacgccaccagcagcggctgcatctccgaccacggcaatacccgcggcaagggcgtcagctcgcccggatcgcgccgcagcatgatgccggagagtttacgcatcggcttcaacacccgcttgagcagcgcgaacgccaggatcagggtcaacaccaccaccgtgccctggctcagcagcgccgcgatcatcatctgccgcgccaggtaacggcgcgactccagggtttccgccaccaaaatggtcgccatgccgctcacccccgactcgttgaccggctgaaacagcgccgccacgcggatcggccggccgagatattccgcatcgtaaaaatgcaccagcgccgggtagagcgtggaacgcgggatatggggcggcagcgacggcaaatcgtcatagcccgagatgctttttccctgcggcgaaatcacctcgtaatacagttgatcgttcatgttgcgctcgaagctgtcgagcaccacatagggcacatcgactgccaacttgccttcgcgcaccaccagtcgctccgccacggtgcgcgccgacgccagcagcgtgcgatcgtaagccagagtggcggcgctcatggcgctgaagtagtgggtgtagatagagatgccgcccagcgccagcagcggcaggccaaaaaacagcagcagttgatagaacagcgaacgcggggcgttaaaccaccgcattgcagagctccaggctgtagcccagaccgcgcagcgtgacgatcgccacgtcgctgccctgcagctttttccgcaggcggtgtacgtaaagctcgatgctctccggattggcctcgtcggacagcgtaaacacctgctcgaacagctgctgcttggccaccgggcggccgcgccgatgcatcagcgcggtcaacaccgccagttcgcgcggcgtcagcgccagcggcttgctctccagcagaaaatagccttcgtcatggtaggtcaacacgccgtactgcaacgccggctgcggggcgccgacgctgcgacgcagcagcgcccgaatacgcgcctccagctcgtccaattcgaacggcttggtgaggtaatcgtctgcccccagattcaggccccttacccgatcggccacgtcggtgcgcgccgtcagcaacagcaccggcagatcctgcccgcgcttgcgcaggcgcgccagcaaatccaggccgttcaaacgcggcaacgccacatccaacaccgccagcgcataacgctcgttgagcaacagatgatcggccgccacgccgtccggggcgacgtcgacggcaaacccggcgccggtcagcgccttttgcaaccagtgagacagctcggggtgatcttcaaccaataacagtcgcatgttcccattccattgatttacctgaacaacctggcgccgacacggcatccgttaacaggctgataacaaaggatggcatggaaaataaggggataaaagagcgccgcgccgccagttttgggagctggcacacaattatgcgtatggagcgcgatcgcagggcggcgtcagatcagcggaatggggctatcggcaacggcaatgtccagcaccgggcgcagcttgtcggcggtaaacggcgaagaaaccagcacggagcggttgttggcggcaaacaccagatcgatgccggtcacgcaggcggtcatctgacaggcatacttttcaccgtcggcgttgacgaaatgcagctcaaacacgccaacctcggggcgcaggcgcttcaaacgacactgcccgctttctcccgccatctcggcgtagacctcaggcaaccgtttaattgcgcatactttggcgctgtccctgccaccaaacaatttccctaacgaaaacatattactgcgtctctattcatttcactgatcatgattttatcgcaaaagcagaacgacaaacctgatattacgcaggattttggccggtttagcgccctgttcttgccctcgtttctatggtagcgcacccgccattcgctggcgacaagagaccctaatcacagactggaaacttttccggccactgaaaggtaaatgaaaggttgttgttttaacaatcctgcaaccgcacccggcgggatttcacaaccagaacaataccgagggcaagtcacaatgaaaaaaataatgacccgaacctttaccgccgccgccctgttgctggcggcctctcagtccttcgccgcagaggcgcccaaacgcaccgaatgcattgcgccggccaaacccggcggcggcttcgatctgacctgcaaactgattcaggtgtcgctgcaggataccaaggccatcgataaaccgatgcgcgtcacctatatgcccggcggcgtcggcgcggtggcctacaacgccatcgtcgcacaacgcccggcggagttcggcaccgtggtggccttctccggcggctcgctgctcaatctggcccagggcaagttcggccgctacaacgtggacgacgtgagatggctggcggcggtcggcaccgactacggcatgatcgcagtgcgcgccgactcgccttacaaaaccctgaaagacctgatggacgctttccaaaaagatcccaacagcgtggtgttcggcgccggcgcctccatcggcagccaggactggatgaaaaccgcgctgctggcgcgcgaagtcggcgtggatccgcgcaagatgcgctacgtggcgttcgaaggcggcggcgagccggtcaccgcgctgctgggcaaccatattcaggcggtttccggtgacctgagcgagatggtgccttacctgcagggcgacaagatccgcgtgctggcggtgtatgccgagcaacgtctgccgggccaactggccgatattcccaccgccaaagagcagggatacagcctggtgtggccgatcattcgcggcttctacgtcgggccgaaagtcagcgatgaagagtatcagtggtggatcgacaccttccagaaaatgatggcgaccgacgaattcaagcagcagcgcgatctgcgcggcctgttcgaattcaacctgaccggcaaagagctggacgcctacgtgaagaaccaggttgcccaataccgtgagcaggcgaaagtgttcggcctggccaaataaccgcaggggaaaaccatgagcgatcgtatttttgccggtttttggctgctgctgtgtatcggcgggctgttcatcggctggggcatccagagcgaatacagctatgaaccgctggggccgcgcccgttcccgctggcgatcctcagcctgatggcgctgtgcgcagccctgctgttgctgcgccacccgcaggcggtggagtggccgcacagcaaggtgttgcagcggctgctggtgctggtgatcaccctggtgctgtatgcctggggctttgaatggctcggcttcccgctggcgaccgcgctgctgacgttcagcatcggcctgttgtttcaggccagcctgccggcggcggccatctccggcgtcatcatgggcgcagcgttgtactacgcctttgaccaacttctcgatgtcacactgccgctcggcgcctggctgagctaacgggagcgatgatggatacctggatgtatttgacccaagggtttgaagtggcgctggtgccgcagaacctgattatcgccctgatcggctgcttcgtcggcaccatcgtcggcctgttgccggggctggggccgatcaacggcgtggcgatcctgctgccgctggcgttcgccctcaaactgccggccgaatcggcgctgatcctgctggcgacggtgtatatcggctgcgaatacggcgggcgcatctcgtcgattctgctcaacgtgccgggcgacgcggcggcgatcatgaccgcgctggacggctacccaatggcgcagcaggggcgcgccggcgtggcgctgtccatctcggcggtcagctcgttcgtcggctcgatgatcgccatcggcggcatcattctgttcgcgccgctgctggcccgctggtcgctggccttcggcccggcggaatatttcgccctgatggtgttcgccatcgcctgcctcggcagcatgatgagccagaacccgctgaaatcgctgctggcggcgctgatcggcctggggctggcaacggtgggcgtcgacgccaacaccggcgtttaccgctttaccttcgacagcgtgcacctctccgacggcgtgcagtttatcgtggtggtgatcggcctgttctcggtcagtgaaatcctgttgatgctggaaagcaccagcgccgggcaaaagctggtgcgtaaaaccggccggttgctgttcaaccgcaaagaggcggcgcagtgcgcgggcccgaccctgcgttcgtcggtgatcggtttcttcgtcggcattctgccgggcgccggcgccactatcgccagcgcgctgacctacatgaccgagaagaaaatcagcggcaacagcgataccttcggcaagggcgatatccgcggcgtcgcggcgccggaagcggccaacaacgcctcggcctgcggttcgttcattccgatgctgacgctgggggtgccgggttccggcaccacggcggtgatgatgggcgcgctgacgctgtacaacatcacccccggcccggcgatgttcaccgaacagccggatatcgtctgggggctgatcgccgcgctgctgatcgccaacgtcattttgttgatcatgaacctgccgctggtcggtctgttcacccgcatgctgaccatcccgctgtggttcctggtgccggcgatcgccgcggtttcggcggtgggggtttatgcggtgcacagcaccaccttcgacctgctgttgatggtcgggttaggcgtgttcggctacattctgcggaaaatgcatttcccgatgtcgccgctgattctgggctttgtgctgggtgagatgctggaacaaaacctgcgccgcgcgctgtcgatcagcaacggcgagttcggcattctgtggagcagcagcatcgcgcaaacgctgctggtattggcggtcgcggtgctggcgttgccgccgctgctgcgcctgatgcgcaaacgccgccaaccgacggccgaggccaaggccgaataacgcgaaacgggcggggatcccccgcccgtagtgtttaacggcgcaaggccgccattcccctttccagcgccccgatatcgttatcggcaagcaacggctgaatcaccgcaaagtccacctcggacaagtcatagaggcgcaaggcaagcaaccgtgcgatgacttccggcgcgaaccgccaacggataaacctcgccgggttaccaccgacgatggcataaggcgcaacatcgccggccaccacgctaccggcggcgacgatcgccccctcgcctatcgagatccccggcatcagcatcgcccgcatgccgatccagcagccgtcacccagccgggtatcacctttgggacggtatgcctgcttgatggttgccataaacgggtacaggctcagccagtcgatgcgatgggtgtgattaccgcccatcaggatcaccgcttcggccgcgatgcacacataatcgccgatcagcaggcgatctatttcgcccagcggctgccattggcggctgaccgcgtcgccgtgcagatagcgcaccaccgagcgttcgaagccgttatcccagcagtcgctgtagtagctgtgggtgcctttgacgatgatattcgggttggtcaccgtctgatgcagcagttcggtttgggaccagtgtttttcggacatggcgtattctcttgttaccggaataaaagccacggaacggaatgtctgtggccgtgttgtcgttcactcaacacggccattcaagcgataagcgctcgtttcaatctcgggttattcatcattagtgcctcccttgcgaggcacaagggtaaccgatcacgcctcggcggtcttgcttttcaacagcagcaccccgcccatcaccaacgcgctgcccagcagctgcagctgattcatgctttcccccagcaggaaataggcgatcaccgcggtgaaaaccagctccaacgacaggatcaggttggctacggccagcggcagcgttttcaggctgatgttatacaacccgaagcccaacagcgtcggcccggcggccaatgccagcagcaacagccagccgctccactggatgccctgtgcgccgtgcgacaggaaccacaaatcgccggccatgccgtggaacaccgccaacgggaacgccgtcagcgccgcgttgaacgccagctgatacagcgccgaaaaaccgaacacgtacaggatggtgttccacaccggatagccgcgttcgctggccacccgcccgccgagggtatacagggtatagccgatgcccgacagcatccctaccagcagccccagcagatcgaagtggctgttccccatgctgtcgccgttgctgaccaggaagcaaccgcccaggctgatggcgatcaccagcagttggcgcagcgtcaggcgctcgctgtacatcacccagccgaggaacacggtaaagcccaccgaacagtaggtcagtatggtcgccaccgacgcgccattcagcgctaccgacagcgtccacaggctgttgaacagcgccagcagcagcccgtaaagcgcgtagaacaccacctgctcacggcgcagacgcgcccactgcggtttcaccagcaacagcagcggcaacagcaccagcgccaccagcgccgcgcgccagaacgccagcacgaaggtcggcagctgatagtactcggtcagcgcgcggatgatgatggcggtaaaggccagcagcatggcgctgataatggcgatgacgtaaccctggcggctgccctgcaagagacgcgcgccgggcaacaaaggccgggcggaaacgcctgacggtaatgacatgagatcctcgggaaaatggcgacataaatgctcaggcgcacagtgtaacgcggccatattttcccactatagccacttttcagcgttgtcatgcaggccacttttctgcgcttgaagccctgttgacatggggtatagtaaaaagctctctccctaaccgggccaatttcgcatgcacattccgttagatcgcgagcaggacgttccgctgtatttgcagatcgaagaagcgctgcggcgcgccatcctcaccggcgtgttcgtggatggcgacaagctgccctcgacacgcacgctggctgccgaattggcggtcagccgtttgacggtggataacgcctatgccgaactggcggccaagggctttttgcaccagcggcgcggcagcggcgcctatgtcgcgcacccgcaggcgcaaacgcgcccggcccggccgaccagcaatgcccctttcccgctggagagcttcaccaccctcacctcgcggctggacggctatgccgacgccccgctgccggaggggctgatcaactttgccgccggcgtcggcagccccaagatatttccgctggaggcgtttcgcaaagtgctgctgtcggtgctcagccgccacgcggaagaagccttcagttacggcgaatactgcggctactacccgctgcgcgatacgctgagccgcattctcagcgcccagggcatccccacgcaggccgaacaggtgctgatcaccaacggttcgcagcatgccatcagtctggtggtgcaaagcctgctggcgccgggtgatacggtgatcgtcgaagagccgacctacgccgaagcgctgggcctgctgcgccagcaccgcatcaatatcgtctccgtgcccggcgatcgccacggcatgctggtcgatcgactgcccgagctgctggaacgccaccgccctaaactgatctacaccatccccaacttccacaacccgaccggccgctgcctgagcgaggcccgccggcggcgcctgctggcgatcgcccaacaggccggcgtggtgatcctggaggacgacttcgtcggcgatctgcgttatcagggcaaacagctgccgtcgctgcgcgcgctggcgcagccgggcgcggtgatctacgtcagcaccttctccaagatgctgctgcccagcatgcgcatcggctatctggtggcggacagcgaacactatcagcgtttcgccaggctgaaacacgtcgacagcttcaccagctccagcctgatccagcgcgcgctggacgcgttcgtcaccgtcggccgttacgacaagcagctgcggcgcgccggacgcgtctaccgcctgcatctggaagtgatgatcgacgcgttgcaacatcggctgccgccggggtgccgtttcgaaacgccgcaaggcggcttgtttatctggctgacgctgccgaaggcggtgaccaccgccgagctgatgccggtggcctggcgacacggggtgaccttcgcgcgcggcgaatgcttctatgcgcaggaacagctgggcgcacacggcctgaggctgaattttgccgccaactcgccgccgcagattgaagaaggtatcgcccggctgtgccgggcgattgaggaagtgatagcggagaaaagcaccggttagacggcggcccaccacagccgcagcttcatcccccagtagctggtccagccggtggtgctttgcaccaccttgccctgcgagatcaccacgaaggtcggcgtgacgccaatccgccactgcgccgacagcgcgccggccggatcgttgaccaccggcagcgccagccgtttacgcgccagccactgcttcacctgggcatcatcgcccgatcgcagcgcgacggtcagcacgttgccgcccgccgcctgcaagcgggcgacgtccggcgtggtgaaacggcaaacgccgcaccagctggcccaaaagtaaaccagcagcggccgctcatggctgagctgcgccaacgacacgcgctcgccgtccagcgaggtcagcgtctgggcatcgaaggccggcggcgcctgcggcgcattcagccaatccatcaccgtcaccaccgccaatgcgatcagcgccagcagcaacaactcgcgcccccagcgcttgagcttagccattgttagccttcgccaactgctgtttcaccatcgcttccagctcttcatacgacaccgcccccggcagcattcgatcgccgatcagcgtcgccggcgtcccttgtacgcccagttgctccgccaacgccatattggtgcgcagcgtggtcatgctctgttcgctcggcgccaccgccttgacgccggttttctcctgcgcggcggcgatgctggcattgtcgtggaagccctttttcgccatcagccgctggtgcagggcccagaattgatccgggtgctgttgccaggtggtgagcgccacgcgcgccgaactgaccgagctttcgcccttgaacggcagcagcttcaccaccagcgctacgtccggatattgcttgacgattttctccaacatcggatcaaaacgcttgcagtacgggcagttatagtcagtaaaggtcaccagcgtcagtttggcgttggcggcgcccaggcgcgggctggccggatcctggtacagcgttttggcgttctgcttgatagcctggctgatttgctcgccggcggtttgctgctgccaggcgtccaccgcctgcgccagaatgtccgggttggacaccagcgtttcgcggatcatctctttgatacgcgcctcttgcgccggggtgaaaggctcggcggcccacgctggggcggcgatgatcatcagtaaaatcagtagttttttcattgttcggttcctttggcatgggaaagcgtttgcagcaaggcgtcacgggtcaacagcggggatagcaccacgccgtccgggctgccggggccatagacttggttgaaaggcacggcgacgctgccgcgcttttgcaggaaggcgccgatgtcggccgatggacggctccagtcgccgcgcagcgcgaccacatcgtcggcgctcagcgcgcgctgtacgtcatcacgcagcagcacattgaatttgttggctttacaggtcacgcaccagtcggctgtcacgtcgacgaacacccgcttatgctgcgccagcgcctcggcgatcgtttgctcgctcagcggttgccactgcacccgatcctgcaacggttggcgccacaggccggcgctcagcgatccggccagcaggaccacccccgccagcaccacagtgcctgccgccagcttggccgccaagcgtgccccctgttggcgccacaccgccaacagcaacgccaacagcgccaacgcccccagccacagcgtagcctgcgcgccaatatggttgctcagcaggctcagcagccacagcgacgacgccagcatcagcagccccatcgccagcttgacggtattcatccagcggccggggcgcggcaatcgcagcgccagcgacggccaggcggcgatcagcagccacggcaggctcatgccgatgccgagcgcgatgaacatgccccacagcaccggcagcgacgccgccagcgcgaaggccaccgccgtgccgagaaacggcgccgagcacggcgtcgccagcagcgtggcgaacgcgccttgccagaaatggccgctcagaccgcgcccgttatgggtcgccagcgaggtattcagatcggacgagagacgcaaatggaacaggccgaacaggttggcgctgaacagcagcgtcaccagcaccataaagccgataaaccacggattctggaactgaatgccccagccgagcgcgtggttgccgagccgcagcagcgtcatcagcagggccagcgccataaacgaggcgacgatgcccagcgacgacgccaggaactgcagacaaacgctgcgccgatcgcgccgctccacctgcaggatggagccgagcttgatgcccagcaccggcagcacgcacggcatcaggttgaggattaacccgcccgccagcgccatcaataccgcctgccacaacgggaacgccgcaccggcgggcgcggccaacgcatcaccaatcggcagcgtaatctgctgcgccatgccgccgtcgtcgatcaccagcgtcagcgttttgccgcgcaggtccggcgccgcatcgccccagccatcgctgaccggcactcgcgccagcaaccgatcgccgtcggtttcaacctgcggcttgccgagatcggcatccgccagcgtatcgaagaacagcgcaggctgttgccagccggcggcgcgttcggcggcaatctgcagctcgccgctgcgatacccggccttgacgctttccgccaacccggcggcgatcggcacctgccccatcgcctgcgcgaaatcgtgattaaactgcggatcgtgaggcgtcgccagatccagactgaacgggtagtcggtcagaatgcagacgttgctgcaggtggacagcgtcagcgtacccgccagcgggccggatacctggcctgacatcacgatcggcaacgtgacccgatcgtgatagccctgggtggaaatgccggccacctcgaaacgctgcggcgtcggccagtgccaggtcgccggcggtgggttgccttgccagacgatagccggcgcgatgccgccttcgcccggagagcgccaataggttttccaacctttttgcagctcgaccgacagcagcaggcgggtctcccccggctgtgacgtgtcggcgcgcagccgcaccttggcatgatcgttggccggattttgcagccagccgctgtccgccgcctgcaaggcaggcagccacagcataaacaggcaagcgcaggccagcctgatgattttcaacatgttaattctccataaatgattaattcaccacgaaaaacgggcgattaactcattcacggaagacgcataatcgaaggtgcaccctgagggtgggtggtgaaatggcgcgaggaggaggaatgcgcagacgcgcggcgatggtcggcgccaacagcgccagcagcagacccagcccgaacagcacggtttcgaacatcaccggcggcgcggccagcaatgacttggcgctcagctcacagggcgtcggctgcgcttcggcggcctcatcgccggattgaacggcggtggcggccgggatccccagcgtttgctgcagcgcatgcaggcccgccatgcgctgggtcatgcacgtcagcaccaccaggcaagccaggcataaaaaccattttgcaatccgctgccgtttaaccatgccatcctcatgttcagatctggggttatcttagcggcgcagacgcgattagcaacgttttgtcggtaaagaaatgtctgagcggcggtattgatggcggcgatttacaggtatcatagtgggtaagcctgcgcttttcgccgggtacgatgacgattctctcctccaggcattctgcggggatacacagcgaaggactggtgatatgcaacctttgagtgggccgggcaccccaatcgccggcgaacgccccccctccccgggcaaaacggcggccactgacgatcaacccctctctccggcgcagcgcacgacgctggaaaaactgatcgtgaaaatcatgacgctcagcccggtcaaatcggcggagctctgggcgtctctgcgtcacgatctcggcgccgacaaaggcggcgaactgctggcgcgccattttcaaccggcggaacagctgctgcgaacgcgcctgacgcaggcgcagcaaaaccatgccgggcgtcaactgctgcaacagctggccgaattgctgccgcagggcaataaccgccaggcggtcagcgactttattcgtcagcagttcggccatacggtgttgagccaactgagcccaccgcaattgcaacaggtacttaatctgttgcaaaccggcggcctgaccattccccagtcgcagcaaaccgccaccagcgatcgcccgctgctgcccgcagagcatcaaagcctgcagcagcagatcaccaaactcagcgccgccaccggcgaagcgccggctaaaatctggcaaacgctgttcgatctggcgggcgtgaaaaccaacgatccgctgccggcgcgccacttccagctgctgaaccagtttttacaagtgaaggtggcgctcagcccgcagaacgcgccgacgctgaacaacctgttggcggcactcaagcagccggcggacgagcgagaactgcagcagatgaacgactattgccaggcgcgcttcaactgcggcgccaatgcgccgctgacgcatccgcaaatgagcgacgccattcatcagctgtttgcccgccgtctggataaagccggccaggcgcagccgatcgccagccaccctgtcgaaccgcagccgctgctcaacccgctgatcgccgccttgcctctgccgctgcaaaaagcgctgagcaagccggccgtagcgctgatcctgctgctgttggcgttggcgatcgtgctggcgctggtgttttaacgcctcaggcgcagccgcagtcctcagcagccgcccgagcgcgcaacgatcccggctgttctccgatggccaatggatggccatcgcgcagccagaagtccagcccgccgatcagctccttcaccctgaatcccagtttcgccagcttgtaagcacctttggtggatccgttgcagccaatgccgtcgcagtaggtcacatacactttccggcgatccagctgcgccgtgccggcttcatccatcaggcgatgcggcaaactgagcgcaccggggatatgcccggcggcgtacagcgcctgcgcgcgggtgtcgatcaccaccatcccgtccacgccattgcgcagatcttccgccacatcccaggcatccgcatagcggctcagtttagccgccagataggccaggctttcttccggcgccgccggcggaaaagccagcaccaatgattctttcgacatatcacttactcccgtgcatcaagacagatgacaatagtgccccattttggtcttatgattgatacccattatccacagatgataagacccattatgcggcacacgctgatcacgctgtttcagcaatcgccccaggccgtcggcacgctgcgcgaacgtctttgtgcagcattgcggcaggccatccaccacggcgcattgaacattgggcaacgcctgccctccagccgagtgctggctggggatctgaaactctcaagggtgaccgtcgaagcagcgtacggccagttggaggcggaggggtatttgcagcgccgcgtcggccagggcacatttgtggctatccgcatcgccaaatcgccgccgccgccgcctcgcaccgccatgccgcgcctttcgcaacgcggccaacagatcgtgcaaaccggcggctgccgcgatccgcagcagccacaggcgtttgccgccggctcgccggatctgcgcgcgtttccgctagccttgtggaagcaactgaccgcacagcgcctgcggctacagggagaaagcctgctgcgctacggcgacccgcagggctatttgccgctgcgtgaagcgattgccgcccacgtcaaccaaacgcgcggcgtaatctgcgatgcaaaccaggttatcgtgctgaccagttcacagcaggcgctgcagctgatcgccacgttgctgctggacagcggcgacagcgtctggatggaagaaccgggttacgccggggcgagaaacgcctttatcagcgccggcgccgccctgacgccggtggcggtagacggcgacggcctgcgcgctgagccctccttgcccgagccgcgtttgatttatttgacgccctcgcaccaatacccaaccggcgcagcgctcagcctggcgcgccgcttggcactgctgacgctggcggaaaagcagcaggcctggatcattgaggacgattacgacagcgagtttcattacgacggcctgccgataccggcgatgcagggtctggatcgccgtggccgggtgctgtacctcggcaccttctccaaatcactgttcccttcgctgcggttggcgtacctgatcgtaccgcccacgctggttgaagcgttcgtcaccgcacgcacggtgtatgacggccacagcgcgcagctgatgcaggcggtcaccgccgaattcatccgccaggggcacttcgccgcgcatatccgctacatgcgccaactctaccatagccggcgcgatgtgttgctggcggcagtacgcgaaaaactcgaccacttcgccacccccgctcccgccgccggcggcctgcagctcagcgtctggctgccgcccggccaggaggcggcgctcagccggcaggcgcggcggctcggcatccttacgcccgggttaacagcgcaataccaaacggttcaggcgcagcgcgacgggtggctgctgggcttttcggccctgacgccgggcgagatccgctgcgccgtcgagcggctggcgcggatcaccgtggcttagcctggccccaatgggacgccgatcggcttattgttcggtcaggcgcatctccgccaccagcggcaggtggtcgctcaccgccggccaatgcacgccgttccagtcgccgctggcgttcggcaccgtcaggctgtccagatgccagcgctgcgcgttgccggtgaagatgtaatccaccttgatctcggcgttttccgccggccagctgcggccgtcctgcccgttgggcatgatatcgttccaataacggctcagctccagccaggtgacgctgcccggcacatcgttcatatcgccgaacagcagcttgatgccgcgcacttcgatggtgcgatcgttcagctcccgtacctgatccagacgcatcgtcggatcttccttggtatcgaggtgggtgttgaacagggtgatcggcgtcgggaactccggcacatcgaccttggcgctgaaggcgatgcgctgttcgcgctggccggacggcagcggatagatcacggcgtcgtgcagcggatacttcgacagaaacgccaggccgtattcaccgccgtcgaaatcgatcgcccggccgaacaccgcctgcatgccggtcagtttcgccagttccgccgcctgatcgacccgcccgctgcgggcggtgagtttatccacctcctgcagcgccaccacgtcgacattcatcgcgcgaatcgccttggcgatggcggtcatgtcgctgaccttgccggcggcgatattgaagctggcgacgcggatcttcggcgcctgctccagttcgtaggttttgttcttcaggccgcccaacgcgctggccacttcgcggctgttggcgttgctgttggcgtgcccggtatcggcagacgaccaggcgctgtgagagatgcccagggacagtaaggtgataagcagagcgtgaccggtgtgcatgaattctccttgagggacagataagtgttatgtgggcgcttcctggcccacagctaacaccgattttgccgcagaaacctgcgactatttcctagttgcaccgctatttttcgtttctgcgcgatgcttcgcattctggcggtttacgcattgcaccgttggacaaacggctgatttcgttttaaaaccggtagattgccaaccgcgaggagttccgatgaccagcccgattgccgaacagcttaccgaacgtttcttccgttatctggcggtgaccagccagagcaacgccgccgcagccaccctgcccagcacgccggggcagcatgagatggcgcaactgttggcggacgagctgcgccggctcggcctggccgacgtgcagatcgacgagcacgccaccgtgaccgcccgcaagcccggcacccaacccggcgcgccgcgcatcggcttcatcacgcatatcgacaccgtggacgtcggcctgtcgcccgagattcgcccgcagcgcctgcgcttcaccggcgaagatttatgcctgaacgccgagcaaggtatctggctgcgtaccgccgagcatccggagatcctgccctaccgaaacgaagagatcctgttcagcgacggcaccagcgtgctgggcgccgacaataaggcggcggttaccgtggtgatgacgctgctggccaacctgaccgcggccgatcgccacggcgatatcgtggtggcgttcgtgccggacgaagaaatcggcctgcgcggcgccaaagcgctggatctgcagcgtttccccgtcgatttcgcctacaccatcgactgctgcgaactgggtgaagtggtgtacgagaatttcaacgcggcggcggcggagatccgcatcgagggggtgaccgcccacccgatgtcggcgaaaaacgtgttaatcaacccgatacgcatcgccaacgacatcatcaaccgattcgacgtgcaggataccccggagcacaccgaggggcgcgagggctatttctggttcaccgatctggccgccaacgccaatcaggcgacgctgaaggtgtcgattcgcgacttcgatcgcgcggcgttcgaggcgcgcaaggcccgccttgaggaaacggtgcgccaggtggcggccaactacccgcgcgccaacgtcagctgcagcgtcagcgacatctacagcaacatcagcaacgccatcggcgaggaccggcgcgctatcgatctgatcttcggcgccctcgccgcccacggcatcccgccgaaggtgatcccgatgcgcggcggcaccgacggcgcggcgctctccagccgtggcatcctgacgcccaattacttcaccggcgcgcataacttccactcgcgcttcgagtttttacccgtcagcgccttcgtgaaatcctatcaggtgacccgcagcatttgcctgctggccgcgcggcaaagcggccaaccggcttagctcatcacccagccgagcaacgcggcccatgccaacagcggcagcgaataatagtggaagcgcaaccagatcttgcgctcccccgccatgcgcaacgcaatcaggttagcgagcgatccgatcgccaacccgaagccgccggcgttgaccgcataggccaactgagcgctggagggcatatagttgagcaacagtatggtggccggcacgttgctgacgatctgcgacagcccgacgcccaacgcatacacgctcccctcgctcagcccggcgatggaggcgaacgccggctgaagcggcggcaaacgggtaaacaggccgacatcgatgaacatggcggcgaacacgaaaatcaggctccagtcgatctgcaacagcactcggcgcgccagcagcaagaaaccggcgaacaccgccagcagcccatacaacggcagatcgaaatcgagacacagcaggaaaaccgcatacagcccgacacagctcagcaacagcggccgctggtagggatacccctcggtattcggcgttttcacgatgtcgcgcgccgggaagctgaaccaggtcagcaccagcaggctcaacatcattgcgacgccaaacggcgccatctggccgatgaagccgaggaaagagaggccggagcggctccacagcaggatattttgcgggttgccgatcggcgtcagcaacgaaccggcgttcaccgccagcgcctggaagatgatcaggcggccgaccggcagcgccgacagctttttcagcgtgatggtgagcggtatgacgataaacagcgctacgtcgttagtcagaaatgacgacaacagcgcggcggagaacaccaggaacagcgccagccgccgttcgctgtgcaagcggttgataatcttgcggccgacaaaatcgaagtagccgctgacctccacccctttggtcagcagcatcagccccaacagggtgatgagggtacggccgtcgataaaaccacccagcgctgccagcggctgcggatgaaaggcgaacatcgccacgccggccagcagcaatgcatgcaagaaacggtctttggcaaagggatggatgagccgggaaatggcggttgaactcatagcggcagtgtgaacctcaccgaaaagaatgggcagacgttagctcagacgcggcttcagcgccagcaaaatgctattttacctttatccgctttccatttgccgcgctttactttatttgtagcggctttcacggtttcaaaggacatgttatggcttccctgttcgccaacggagcgctgttgagcgccttatgcgccctgctcgccgcctgcgacgacgcctcctcccgcccgcaaatcgatattgacggcaaaaccatgggcactttctacagcgtaaaagtcagcggtgacgtcgcgatcggcaaacaagaattgcagcggcagatcgacacggtgctcgaacgggccaacgacgacatctcgacctaccgcgccaattcggtgctgtcgaggtttaaccgcaatgttagcctcgaaccgcagtctatcccgcgcgacatggcggacatcgtgttgatggctcaacgcatcggccgcgataccggcggcgccatggacatcaccgtcggccccttggtgaacctgtgggggttcggtcccgacaaacatccggtcaaggtgccggaacaggcgcagatcgacgcggcaaagcagcgcaccggcctgcagcacctgaagctgatcagcgacaaccgcggggagtggctgcaaaaagatctgccgggcatgtatgtcgatctctcgacgctgggcgaaggctatggcgccgatgagctggtgcgcctgatgaaccgtcacggcattaccaactacctggtatcggtcggtggtgcggtctcttcacgcggcgtcaacggccagggcaagccctggcgggtggcgatccaaaagccgaccgaccgtgaaaatgcggtacaggcgctggtggatcttcacggttacggcatcagcaccgccggcagctatcgcaactactttgaacaaaacggccagcgctactcccatgtcatcgatccgaccaccggcaggccgatcaaccaccggctggtttccgccacggtgatcgccccgaccgcgctcgaggccgacggctgggataccggtttgatggtgctgggcccggagaaagcgttgcagctcgcggaagagaaagggctggcggtctacctgatcagtaaaaccgacgacggcttcagcgccgtgatgacgccgcagttcaaagcgtttttggtgcagtgagataaaaaaagcccggcacgcaatggccgggcttggtcctgttccgcgccgatcacttggtcagcgcgatgatgccaagggtcagaccggcaaccgccgccgcgccgccggcgatcgcgcccgcggtttcccagttatcctgagtggtacccttcatgcaggtgttggtgtgcaccagacgcccctggtcatcatagaccggcacgcagggagaatcggtggcgcatccggccaacacggccgacagtaacccaaccgcaattaactttttcatacttcttgcctcaatgttcgatcactttagaaagctacgccgagcgataatcacgctacctggctattgtatgcccaacgcgtgtaatggcgaggtaatgatgtgtcaggggatgtgatttgggaaaactccgagcgcccggccagtgggcttcgggcagtaaaaagcccgcgaaaacgcgggcttgatggcgaggtgaagctcaggcggaattatttcgccagtttgcgcatcaccagggtggcgttggtgccgccgaagccgaagctgttggacatcacggtggtcagctcgcgctgagtcggctgagtcacgatgttcatgccgaccgcctgttcatccagggtttcgatgttgatgctcggtgcgataaatccgtgctccagcatcaacaggctgtagatcgcttcctgcacgcccgcggcgcccagcgagtgaccggtcatcgccttggtggaggagatggccggggtattgtcgccgaacacttcgcgaatggcgcccagctctttcacgtcgcccaccggtgtggaggtgccgtgcacgttgatgtagtcgatcggcgcgtccagatcctgcatcgccatcttcatgcagcgcactgcgccttcgcccgaaggggcaaccatgtcggcgccgtcagacgttgcgccgtagccaacgatttctgcgtagatatgtgcgccgcgcgccagcgcgtgctccagttcttcaaccaccaccatgccgccgccgccggcgatgacgaaaccgtcacgatcggcgtcgtaggtgcgagaggctttttccggcgtgtcgttgtacttggtggacagcgcgcccatcgcatcgaactcgcaggccatttcccagcacagctcttcgccgccgccggcgaacacgatgtcctgtttgcccagctggatttgctcaaccgcgttaccgatgcagtgtgcggaggtcgcgcaagcggagctgatggagtagttcacgccgtggattttgaatggcgtcgccaggcaggcggaaacgccggaagccatggctttggtgaccacgtatgggccaaccgctttcaagccacgcgggctgcgcatcgcatcggcgccgaacacctggaagcgcggagaaccgccgccggaaccggcgatcaggcccacgcgcgggttgttttgatactcttcttccttcaaaccggaagaagcgatcgcttcttgcatcgccaggaaggcataaatggaagcgtcgctcatgaaacgcaccgccttgcggtcgatcaggccggtagtgtcgagcttaacttgcccccatacgtgactacgcatgccggaatctttcagctcctgggagaaagtgatcccagaacgtccttcctgcaggcttgccaggacctcctgctggttattaccaatgctggagacaactcccaggccagtaatcactgcacgtttcattcaatacctcttccactatttacctacgggattttgcatcgcactttagcgtacagatgtaagccgaacaagtccgatcagcgtttttcagctttattgtcgtccagtttgcgccggggcgccagcgccgttagaattcgcggcatcccttgaatttcgagccattgaccgtgaaccacgcccccatccaaaccgcaacgctaacctggaacgaacagggtacacctgtttcgaaacagtttgatgacgtctatttttccaatcaggatgggctggaagaaacccgctacgtcttcctgcacggcaatcggctgccgcaacgtttcgccgcccatccgcgctcgctgtttgtcgtggcggaaaccgggttcggcaccgggctcaatttcctcacgctgtggcaggccttcgccggcttccgccaggccgagccggacgcgacgctgcagcgcctgcactttatcagcttcgaaaaatttcccctgcagcaggctgacctggcggcggcgcatgcgcgctggccggagctggcgccttacgccgacgaactgcgcgcccaatggccgctgccgttgccggggtgccatcgcctgctgttggccgaaggccgcattacgctcgatctgtggttcggcgacgtcaacgatctgctgccgcagtttgacgccagcatgaataaccaggtggatgcctggttcctcgacggcttcgcaccggcaaaaaatcccgacatgtggaccgatcaactgttcgtcgccatggcgcgtttcgcccggccgggaggcagcttcgccacctttaccgccgccggcttcgtgcgtcgcggcttgcaacaggccggttttcaggtcaaccgctgcaaaggcttcggccaaaagcgtgagatgctcgccggcgaactcccggccgatacgcagcccgccgcacatccggcgccctggtatcgacgcccggcggcggacaacaccgccgacgtcgccctgatcggcggcggcgtcgccagcgcgctcactgcgctggccctgctgcggcgcggcgccaccgtcacgctgtactgcgccgacgaacaggcggcggagggggcatccggcaaccgccagggcgcgatttatcctttgctgaacggcagcggcgacgcgctggagagtttcttcagcgccgcgtttcccttcgcccgtcgccagtacgacgccctgttgcaacaaggcgtcgcctttgatcaccagtggtgcggcgtcagccagttggcctatgacgacaaaagcggcgccaagatcgccaatatgctgaaaaccgactggccgcaggccttggcgacggcggccgaccgcgagacgctcagcgatcggtgcggcgtcgataccggctttggcggcatcacctacccgctaggcggctggctgtgcccggccgagctgacgcgcggcgctatcgcgctggcgcagcgtcagggcttggtctgccactaccggcacgatgcacagaggctgacgcaggaagaaaacggctggcgcatcgatttcgcccacggcgaaagccgcagccatgcgacggtgatcttggccaacggccaccggctggccgaactggcgccgacggaagccctgccgctgtattcggtacgcgggcaggtgtcgcatatcccaagctcgccggccctcggtcaattgaaacaggtcttgtgttacgacggctacctgacgccggttaatgccaacaacggccagcactgcatcggcgccagctatcagcgcggcgacatcgccaccgactaccgcgagcaggagcaacaggaaaaccgtgaacgcctgctgcgctgcctgccggaacaggcctggccgcagcaggtggacgtcagcgctcagcaggcgcgctgcggcgtgcgcagcgccacccgcgatcatttgccgatggtcggcgcgctgccggactatcaggccacgttgacgcagtatcaggatttgcagcggcagaaccagcgcggcgaaaccgtcgccgatgcgccggtctatcccggcctgttcgctatcggtgggttgggatcgcgcgggctatgttcggcgccgttggcggcggaaattttggcggcgcagctgttcggcgagccgttgccgggcgatgcgcgcctgctggcggcgttgaatccgaatcggatgtgggtgcggaaattgctgaaaggacgtgcggtttaatcaaccttgaggggcgcggcgacgcgccccggcatgacgatcaggcggcaggggttgcagcctgatagaggttttcccacatgccgcgcaccaggatctgatccggcggcgagagttccccggcggcgatcgctttgtgcaggctctcctccacccgcgctttcagcgctgcggcggtgtgttcgccctgctcttccgcctcggccaccgccagcgtcagatgaccgcgcaggtagccaccggcaaacagttcatcatcgctggcgtgctctaccatgtcatcaatcagcgccaaaatgcgcgcttcaaattctgcgatcatcaaatttcctcattaaataacgggctgtggcgtcagttgagatcttccggatacggaaaatgctcggccgccaacggtggcgtattgtagaacgattgcagcgcctgaataaagcgcgcaggccttgtgggtattccctgctccagcagcgccaatacccgggcgcgcaccttgcgttggaacgcaatgcgatccggctcgcagtcgccgttcaggttgtcgcagctgacgttgaacgggaaaccggccgccacgcagaacatccattccagtgcctgcggtttgatctctaccgcttcgaattcgctctgggtctgcgcgtcgcgcccgtccgggcaataccaataaccgaagtccaccaattggcggcgcgcttcaccggcgatgcaccagtgcgaaatttcgtgcaggccgctggcgtagaaaccgtgggcgaacacgatgcggtgatacggcaattcgtcgtcggccggcaggtagatcggttcgtcgtcgcccttcaccaggcgggtgttgtagtcatcgctgaagcagcgattgaagatcgcgatcaactgctcatagtgatgacgggtctgcgtgtctgacataaaaactctataaccacaaaaataaagaggccattatacccgataagacagggcgcgtaagcagcgcaccctcttcatctttaaccgtgcaagaaggcggacagccactgctgaatctctgcgccgtgattgtcgtaaagcagcttgaggctcatcaccagcgagacgatcacgatcatcggccgaatcagtttctgcccgcgggtcagcaccatgtgcgcgcccaaacgcgcccccagcacctgccccaccagcatcaccagaccgatgctccacaccaccttgccgccgatgatgaacagcgccagcccgccgacgttggaggtaaagttcagcaccttggcgtgcgccgtggacttggcgaggttgaaaccgcacagcgtcacataggccagcgcgtagaatgagccggcgccggggccgaagaagccgtcgtaaaacccgacgcagccgccggccaccagcccgaacggcaaggcgccgaggcggcgttgacgatcttcctcacccaggcgcggcatcagcaggaagtagagaccgatgccgatcaccagcagcggcaacatctgccgcagcacatcggcgcgcatatgctgcaccagaatggcgccggcgatcgagccgatcagcgtcagaaaaatcgtcagcttctggtcgttgaggttcaccgctcgccgacgaatgaagtacagactggcggagaaggagccgccgaccgactgcagcttattggtcgccagcgcctgcgccggaggaacccccactgccagcaaggccggcaccgtcagtaatccgccgccgccggcgatggagtcgataaaccccgccagcagcgctaccgcaaacaacaccccgagcatctcggggccaatgacgaaccagtccatgtgttattccgctgagaaatggtgatccagcaatgcctgacaggtaggcggcaacggcggcggcacgggtttgcccggcttcgcgttaggctgatgcggcacgaaccagctcgccagttcggcgccgcagccatcgcccggcggcggcgtatcctgctcctggcactccaggctgccggccgggcaacgcaggcgcacgtgcatgtgcgcacggtggccgaaccacggccgcaccttgtgcaaccaggcgcgatcggcgccggcgtccagacacagacgctgcttgatcgccgggttgacgaagatacgcgtcacctccgcatcctgcgccgccagcttgatcagcgactcaatttgcggttgccattggttcgccaccacctgcttgccgtcgcccgacaccaggtcgatcggctgcggcttgagcaattgctgcgcgctccagcgttggcgcggcagctgcagccagatgtcgacgtcgagcccagactggtggctggcgtggccgctgctgaagcgcccgccggccggcatcgccatatcgccgatcagcaccgtgcccagcgctttctggttcgctttgctgctgaggcgctgtatgaacgccagcagatccgggtggccgaaatagcggcgctggtcggtacgcatcacctggtagttcggtgagttcagcggcaacggctgcgcgccgatgacgcagccgttggcgaaaccgcccaccgcctgcggcgcgccggccaccggatgatcgattttctgccacggcgtcagcgccatggcagaggcggaggccgtcagggccaccaggcccaacatccagtttttcatggcgattaccagcgcggtacgtcggaaaccacatcaccgttttgcgcgcgctggcgcagcaggtgatccatcaacacgatcgccatcatcgcttcggcgatcggcacggcgcggatgcccacgcacggatcgtggcgaccacgggtgaccatttccaccgcttcgccctggcgattgatggtgcgccccggcaccataatgctggaggtcggcttcagcgccagatgcgcaatcaccggttggccgctgctgatgccgccgagaatgccgccggcatggttgctttggaagccttccggggtgatttcatcgcggttttcgctgccgcgtttggtcaccacggcgaacccgtcgccgatctccacgcctttcaccgcgttgatgctcatcagcgcgtgcgccagatcggcatcgaggcggtcaaacaccggctcacccaggccaaccggcacgttttcagcaatcacgctgaccttggcgccgatggagtcaccctcttttttcagcgcgcgcatcagttcgtccagcgcttccagcttgtccggatccgggcagaagaacgggttctgttcgacctgatcccagtctttcagctcgcaggtcacgtcgccgatctgcgccagatagccgcgcacctgcacgccgaacttctgctgcaggtatttcttggcgatagcacccgccgcgacgcgcatggcggtttcacgcgccgaagagcggccgccgccgcgatagtcgcgcagaccgtatttctgttcgtaggtgtagtcggcatgccctggacggaacacgtctttgatggcgctgtagtcttgcgagcgctgatcggtgttttcaatgatcagaccgatgctggtgccggtggtcacgccttcgaatacgccggagagaatgcgcacctgatccggttcacggcgctgggtggtgtaacgcgaggtgcccggacgacggcggtccagatcgtgttgcaaatcggcttcggtgagcgggatgccgggcggcacgccgtcgacgatacaacccagcgccaccccgtgagattcaccgaaggtggtgacgcggaaaatctgcccaatactgtttcctgccatcacggctccttaccgttagtcttttatcgttatgaggcccgccatgcgggccttggaaatgcggcttagctgcgatagaggctgaagtgttccttgcaatccaccagctgctgcttggtcagcatgaacacgccgtcgccgccgttttcgaattccagccaggtgaacgggatgtccggatattgttccatcagatgtaccatgctgttgcccacttcacaaatcagcacgccgtcgtcggtcaggtagtccggcgcgcacgccaggatgcggcgcaccagcttcaggccgtcgctgcccgccgccagccccagttccggctcaaagcggaactcctgcggcagatccgacatgtcttccgcatcgacgtacggcgggttggtgacgatcagatcgtactggatcgcgggaacgtcgcggaacagatcggaacggatcgggatcacctgatgttcgacgccgtgcgcctgaatattgcgctcggttaccgccagcacgtcgctggagatgtccaccgcgtccacttccgcttccgggaaagcgtagccgcaggcgatggcgatgcagccgctgccggtgcacatgtcgaggatatggcgcggcgggtgagggatcagcgcgctgaaacgatcgttgatcagctcgccgatcggtgaacgcggcaccagcacgcgctcgtcgacgtaaaattccatgccgcagaaccaggccttgttggtcagataggcgaccgggatgcgttcgttgacgcggcggatcacgcgctcaacgatgcgatggcgctcgctggaagtcagacgggcggtgtgcatgtcctccggaatgtccaacggcaggaacaggcttggcagcaccaattgcaccgcttcgtcccacggattatcggttccgtgaccataatagatattggcggcgttgaagcggcttaccgtccagcgcagcatatcttgaatggtgtgcagttcgttcactgcttcgtcgacgaaaattttgtccaatttgccctccggcaggcgctgtgtttcatgatttagccgcatagtttgccatgaagcccgcgacaaatcacgcttgcccctcgcgcttttcactctggcccgagttttgcgtcgacagcgctcattcacaaggtaaactagcgaaataaacgatttccggtgaatgaagcatgaagaacaagccccctctgagcaaagacgaacaacagctcttcagagagtcggtggcgggcgcgaaaaagctgcgccaggacaccatcgtccaccgcccgccgaagcccaaggtcaaacagattgcgccgcagcgattgctgcaggagcaggtcgatgccagctattatttttcagatgaataccagccgcagctggaagaggaaggcccgacgcgctacgtgcgccccggcagcagcccgtatgagctgaagaagctgcggcgcggcgattattcgccggagctgtttctcgatttgcacggcctgacccagctgcaggccaagcaggagctgggggcgctgatcgccgcctgcaaacgcgagcacgtgcactgcgcctgcgtgatgcacgggcacggcaagcatatcctcaagcagcaaacgccgctgtggctggcgcagcaccccgacgtgctggcgttccaccaggcgccgaaggaatggggtggcaacgccgccatcctgctgctggtggagctggccgagtaaccccccacagaaacgactcagggcgatgtcagacatcgccctgagtttattccgcaccgcatccgcggttcacactttggccatcacctgtgatgggctgacctgccattcaaacttgccgtagctgccgtccgccggcagatcgacgttggcgatcgccgaggtcgcgaacatcggcgggcactcgcccgggcacagttcggccaccagataccccaccagcggcaggtgcgacacgatcagcaccgagctcaccccttgcatcgccagcgcctgcagatagctgccgacctgttcggcgttgccgcccggcgtcagctcgggcagcacttcttcgccctccggcagcgtcaaggcttcacgcaccgtcgccagcgtctgttcggcccgcagataggggctgaccagcacgcgttcaatatccacagacttggtgttcaaccaggccgccatctgacgggactcgtcgcggccgcacagggtaaggggccttaccgcatcgctggctgcctcgagcgccgcctctccgtgacgcataatcaaaacttgcatattgcaccgctgttgttgacaaagtaacgctatacagaaacgccgtgcgtgctgtaccgccgagttttccaacccaaagccaaagctttaaaacgataacgcgccgtctctttatggcggccgggcattttgcctgaaagtttgcctaaagaaaacgctgttttttacagcaaccctcccctggcaaacctcgattgctcacagaacaatcaattcaacgggttaaattttaaccttgccgccatgaaatttattgatggcggtcaagctaacttaccgctgcctcagccttgctgtacagcctcaccggctgacgctgtcgcaaggagtgatggcgatcacaacgcggccctgttgcaactatagtgcaaatcgggccgccctgcgttcagctccccaacgggtaaaagcgctcgccctgctgcgccatgcgctgcaagcgctcgcacggcgcgaagtgctcgccgtgctgctggcgcaggtagtccagcgtcttcaccactttctcggcgccgagctcgtccatatagcggaacgggccgccgaggaacggcgggaaaccgatgccgaacaccgcaccgatatcgccgtcgcgcgcgctgcggatcacgccttcatccaggcagcgcgccgcttcgttcagcatcatcatcacgcagcgctgggcgacggtcgccggcagcatgtgcgccttcggcgtgacgccgagcaacgtatacaatgaggtatccgcgcgcttacgccgttgacgctgctgcccttcgctcgggtagagatagaagccgcggccgttcttgcgccctttgcgcccgtctttcagcaccgcatcgaacgcggccggcgcggcgaaacgcggccccagcgcctcgaccagcacgggaatgattttggtgccgacgtcgatgcccacttcatccagcagggtgatagggccgaccgggaagccgaagtccaccagcgctttgtccagcgattcaatgggctcgccttccagcaggcagcgcgccgcttcgttgatgtacggcgccaggatgcggttgacataaaaaccggcgctgtcgcccaccacgatggcggtcttgccctgcttgtgcgccagcgctacggtggtggcgatggtttgttcgctggtgccggcgtgcgggatcacttccaccagcggcattttatccaccgggctgaagtagtgcagaccgatcacctgctgcggccgctgggcctgttcggcgatgtggccgataggcagcgaagaggtgttggaggcgaacacggtatgcggcgcgcagttcgcttcgacctcggccaccattttctgcttcagcgccagatcctcaaacaccgcctcgaccacgatatccacctgctcgaagccggtgtaatcggtggagccggagatcaacatcatctgcttttgccgctccgccgggcgcatgcgcttgctgcgtacccgtttgccgagcacgtcccagctgtatttcagcgcatgattgatgccggtttcattgatgtctttgatgcgcaccggcaaaccgccgcgcgtggcggtgacacaggcgatgccgccgcccatcaggccgccgccgagaatgccgacgcgatgcagggcatgcggctgagcattgccgccccgctcttttttcagcgcggtggaggcgaagaacaggctgcgcaacgccgccgactgcggcgtcatcgccagctcgccaaaggcgcgcgcttcggcctcatagccgctggcgctgccgtgatccagcccggtgcgcaccacctgaataatgcgctccgccgccgggtagttgccgtgggttttcgccaacgttttcttgcgcacgatgctgaacagcagatttctgcccagcgggccgttgagcaggcgatcctgccacggcagctcgcgctgatgtttccagccctgtttcacccgctcgatggcggtctgcaacaggatcgattgcggcacggcgtcgtccaccagccccatgcgcagcgcctggcgggcgcgaatgtgcttgccggtcaggatcatgtccagcgccttggcggcgcctatcaggcgcggcaggcgctgagtgccgccagagcccggcagcaggcccagctgcacttccggcagaccgagcgcggttttgtcatccagcgaacagacgcggccgtggcaggccagcgccaattccagcccgccgcccaggcaggcgccgtggatggccgctaccaccggcaccgggaaagcggcgatctgcgccagcgtgctctgccctttcttggccagcgtttccgcctctttggcgctggtgcaggcggcgatcatggtgatgtcggcgccggcgataaacgagtccggcttgccggaaacgatcaccagcccttccagtgcagtgtgctgctgcgcccggatcagcacgtcgttcacctgttcgacgaactcggccttgagcgtattgaccttgtcgcccggcacgtcgatggtgatcaccccgatgttgtcggggcggatcgtcagttgaaaggccgacggtttggcgcgctgttcatgcaatgcgttttcgaaactcattattccacctccacgatcatcgcggcccctaacccgccggcggcgcaggcggtggtcaggcccagcccgccgccgcggcgtttcagctcacgcagcgtctgggtgatcatgcgcgcgccggtggcggcgaacgggtggccataggcgatggaaccgcccaggacgttgaatttgtccatgtccacctcgccgatcgcctggctgcggccaagcttctcgcgggcgaacgcttcgctggcgaacatcttcaggttagccagcgtttgcgcggcgaaagcttcatgcatatcgatgagcgtcagatcggccagaccgatgccggcgcgatccagcgccagcggcgtggcgtaggaaggccccaacagcatgtcttcccacacgtcgatggcggcgaaagcgaaactgcgcagatagccgagcggctgcaggcccagctctttggcgcgcgattcgctcatcatcagtaccgccgccgcgccgtcggtcaacggcgtgctgttggccgcggtgacgctgccgtgtttgcgatcgaacgccggtttcagcttggcgtaggacgccaggctggagtctttacggatgttgttgtcttcggaaagctgcgcgcggtatggcggcacgtaggcggtcatcacctcatcgcgcagccacccctcccgccaggccttggccgccagctcgtgggaacggtgcgccagcgcatcttgcgcttcacgggtgatgccgtggcttttcgccatctgttcggcggtatcgcccatgcgcaggccggtggaatactccgccaccgccggcggcaccggcatcagatcgcggaatttcagccggctgaacaatttgaggcgctgcgacagcgtacgcgccttgttgacgtccaccaacgtgcgcgccagcgccttgctgacgccgatcggcaagacggaagaagagtccgccccgccggcgatgccgacgctgatgctgccggccatgatgctctccgccacgttggcgatcgcctggaagctggtggcgcaggcgcgcgacacgctgtaagcgtcggtatggacgctcatgccggtgcccagcacgatttcacgcgcgatgttcggcgcctcgggcatttgcaccacctgaccgaacaccagctgctcgataagctgcggatcgataccgctgcgcgccaacagctcgctcaccgccgttttccctaaatccaccgccggaatgccgtgataggcggtcgcctgtttggcaaagggggtacgcagtccattcacaatcgcaatgcggtcaccatgacgggtcaccaacggcagtgccttactcataaatgctcctgaagaaaataacgtcagcgcaatgggcagaaagaggtctgacctgatgaggtcattgttaaccaaacggttacatttggcaaaccggcagagatcaaaactgcgagcaggcgcactttctatcgggaggggtacgggaaaggaaatccccggcgcataacaggcggcgccgggggcaaagccgggattaacgcaggccgagctggaagatcagagtttccgcctggcaggcgaaggtgaaatcggcctccaattgcacgccgccgtcaaccggtttaatgctactgctaatgtcacaagggtcggattcgaccgcgcgcgccttttcgctcagggccgccaacatcgcctccgcatcgtgttgattactgaacacctggctgtaggatgcggtgcaatcggtgttatccatcacggtgccgacatccacgcagcaacacgcggcggtttcctgggcgctgcatttattaattgcatctgacatgattggttctcctcaagggcctcggttatcagcccaaattgccgtttcactcaccggcacaaagccacaaaattctgcaggtattttacgcttccgcgccggcaatcactagcacttacttttactgggtgttttaagtgatggaaatcacaaataaaaatgagcgactgctaaggaatggtaagaattttgttatttaccgctggctttttgttaagcagatctcttttttgatatcaggttggaaatatttcaaaaacaaacttgcaacattttcacaggtcagacctatacttcagccactggtctgatttgtctgaacgataacggaccctacaatcccgcgctccttgttacttcgtgtaacaatagtttaaataataaacacataatgaggttttggtcatgagccagaaaaacctattgactaaatcagctctcgcagctgcagtggcaattatttcttcaaacgtgtctgccgcaggattccagctgaatgagttctcatcagctggtttaggacgttcgtattctggcgaaggcgccatggcggatacggcggcccccgcaagccgcaacccggcgttgctgatgatgtatacccgcccggaactctctttcggcgcagtcttcatcgatccggacgtcgatatcagtggccaatccccttccggcgccagtctggatgcgaaaaacatcgcgccgaccgcctgggtgccgaacctgcattatgttcacccgattaacgatcaattcgccgtaggcggctcggtcaccagcaacttcggtttggcgaccgaatacaacgacggttacgcggcgggttccatgggcggcaaaaccgacctggaaaccttgaaccttaacctgagcggcgcttatcgcctgaacaagaacttcagcttcggtctgggctttgacgccgtttatgccaaggccaaactcgagcgctatgccggcgatctgccaaaactgatcgccggatcgggccagttaccgccgcagttggccggcccggtttcgcagatcccggcagatacccagatttcgcacctgaaaggcgacgaatggggcttcggctggaacgccggtattctgtacgaagtggatgaaaacaaccgttacggcttcacctatcgctcagaagtgaaaatcgactttgacggcgattacaaaagcagcctgccttcagccttcaacccgttgctggcctctaaaggtctgccgtggggcaccaacggcaccaccattccgggttctctgagcctgcacctgccggaaatgtgggaactgtccggctacaacaaagtggcgccgcagtgggctatccactacagcctggcctacaccagctggagccagttccaggagctgaaagccaccggcaacaacggccagacgctgttccagaagcatgaaggcttcaaagacgcttaccgcatcgcgctgggcaccacctacttctacgacgataactggaccttccgtaccggtatcgccttcgatgacagcccggtgcctgcccaaaaccgttcgatctccattccggatcaggaccgtttctggctgagtgccggtaccacctatgcgttcaacaaagacgcctcggttgacgtcggcgtgtcctacatgcacggccagaaagtcaccatcaatgaaggtccttacaccttcacctccgaaggcaaggcctggctgtacggcgccaacttcaactaccgcttctaatctcgcctgagatggatgccaaagcgccccgcggggcgctttttctttgcctgtcgctcgccgcgggcgtaaaaaaacccgccagacggcgggttttcattggcataaggccggcggttactgcgagtcgatctcgtccagatcgccctgaatcgccttggcgttcgggttctcttccggcttgagcgaaccgccgttggcgatgaagtcgtggcgctggaagtaagcttcgcgcaccatgacataaggatcggaggagttgcgcagcaggccgtcggaatccagcagttgagcgcgggtttcgataccctcgaccacccatttgcccgccgacatccagaaagtcaggtagctcagcatcggatacagcgtatccgcaaagtcgccgccgtcttcacgcagcgtgaagctgccgtagcccggcagcatcacgtacggaccgtagcccacatcgtaatgccccaacgtgctgccgaaacggttcggctcttcgcgcgccagtttcgggttggccatgccggccacgtcgatcaggccgcccatcccgagcagggtgttcaggaagaaacggttgaagtggatcatcccgcggtagggatcgcccttcaggaaggcgttgaccatgctggccggctcttccaggttagaggtgaagttgctgatgccgttacgcgccggcatcggcacgtagtcgcgccaggccaccgcgaccggacgcaggatataaggatccaggacgttgtagttgaagtcgaacatcgtccggttaaatccttccagcggatcggaacgcccttgcggatcgttgtctggcgcgctggcacagcccaccagtaataccgttgcgaatgccaccccagtcaggcgaaagttcatatttttctccataaaaacacgttcggtcttatttttcagggacctgcttgtttatctgaacgctaacctgctctttaccgctgaatgtctgcagcgagctttcgccgaaccagtcccccggctgcggcgtggccaatccgtcctgtgagaggcgcacacgcacctgcacctgatgctgcgccgagagcagacgctcgggcatcatggcgttgctgtcatccagtgagaaagacagcggaaaacggctcagcggcaattgttttaccgcgaccggcaccgggctgacgccgtcggtgaccgaaatgaccagcgtcccctgcggcggcatggctttcgccgcctgcggtgacagcgcaacggtcacattcagtttaacattttctccgcctgcctgggcttttgcttgtgcaatactgcgctttatcacttccgcgcgcggatcgttggccggcagcagctgcagcatcacctgccaggcgccgatcgcctgcttgaaatcgccctgttcgaaggcattgaacgccagcaggctcagcacccgcggatcgccgtggttttccgcgatcatgcgccgcaacagctgcgccgcctgcttgttatcctccggatcgttggagcgcgtcaagacctcggcatagccgagccgcacttccagactattcggatccaattgataagcatgagcaaacgcctgcgtagcggtggtggcattattcagcgccatgccgacgcgccccagcatcatccagtcactgatgttgcgatcgtcctgttgcagcgcggtgcgcagccccagcccgaggcgagcaatctcttccatgctcagcggtttggcgcgctcattggcaacgcgctcgcgcaattccggcatttgcgcctgcaccagacgccagtccagcacctgcgccagcccgccggttttcagataaaagccaacggtcaccgccagcagtaacagcacgcccggcaccagcgcccagcggttgatcggcttcgcctgcgccatctgctcggccgggatgtcgttcaacaggttctgttgcagctctttgaccagttccgggcgctcggccaccacgccctgctgctcatcctgctccaactcgctgaggcgatcctgataaaacgccttgttcagcgcatcgcgcgtggcggcgctctgcttgccgcggcgcatcgccggcaccaccagcaacgcggcagcgccggccagcaacacgcaaataatcagccaaaaagccattagggtttcttcctgtcagtctcttgcaacagcgccgccaggcgctgccgttcccgttcggagaatgcatcgtccaccgccgcgtcgggcttgcgacgggtgcgcaggatcaccactgccccgccgatcaatacgaacagcagcgggccgatccacaagatcagcgtcgccggcgttaccggcggctcgtaggtgacgaagttgccataacgcgccaccatgtaatcgatgatctgctgcttgctttgcccctgcatcatcagctcgtacaccttggtgcgcatgtcggcggcgataatggcgttggaatcggcaatgctgttgttttggcatttcgggcagcgcagctgttcggtcaactcgcgatactgctgctcctgctcgacggagttgaagcgataggtatcgatcgccgcggcggcgctccagctcagcagcgcggcgcacagcagaacaatcagcctcatgcctcacccccgtactttttatacagcggcagcacttcctgctgccagacgcgctcattcatgtcgccggcgtggcgatagcgaataatcccctggccgtcgataaggaaggtctcaggcgcgccgtacaccccgagatccaaccccagcatgccgtcgccgtcgtacagactgagggcgtagggattgccgagagagttgagccaggtcaccgccttggcgcgatcgtctttgtagttcaggccgaccacccgtacgccgcgcgccgccagcgtattgagatactgatgttccgcgcggcaggttgggcaccaggtggcccagacgttgagcaagatcggcttgccgtcgcgcagcaccgcctgatcgtaggttttgccaggctgatccaacgattccagcctgaaggtcggcaccggcttaccgatcagcgccgactccagcatggtcggatcttcgccgcccgcgttgcgcgtgagctgcaccatcagagccgccaccagcagcaggaagagcaccaacgggataaacagcagcttacgcttcatgattgcgcctccagtttgccttcacgcttgagctttttgctcatgcgataacgcgggtcgagaatgcacagcaggccgccgatcgccataaagacaccgccgaaccagatccagcgcacgaagggtttgtaatacaggcgcaccgcccaggaaccgtcttccagctcctcgcccagcgccgcgtacagatcgcggctgaacccgccgtcgatcgccgcctcggtcatcatgctgcgcgccacgctgtagtagcgtttctccgcgtgcaacgtcgcctccggcttgccgttgcgcgtgacgtcgatgatgccgacgccgccgctgtagttcgggccgcgaatgtcgtgcacgtcgcggaacacgaagtgatagttgtggatatccacactgtcgccggccttcatccgcacgtcgcgctccacgctgtaattctggctgaaggcgatgccgattaccgtcaccgccacgccgaggtggccgagcaccatgccccagtggctgcgagacagctgccgcagaccgcgccagaaaccgtggcggtgggtggcgcgctcatgcagctccatcagcgtcaggatgatcacccacagcgccataatcaggcccaccaccgtcatgccggcgatgctgtcctgcagcaaccacggcagcagaatcgacagcaccagcgtcgccagcagcgccacgccgaggcggcgccacagtttgcccggctcatcgcggcgccagcgcaccagcggcccgatgcccaacagcagcgccagcggcgccatcagccaggtgaacatggtgttgaagaacggctcgccgatcgagatgctgcccagccccagctgtttgtgcaccagcggcagcagcgtgcccaacagcaccaccagcatggcggcgatcagcagcacgttgttgcccagcaggaaggtctcgcgcgagaaggtctcgtgctgcacccggctgcgcacctggccgcccttgaccgcgtacagcagcagcgaaccgccgatgacgatcaccagataggcgagaataaacatgccgcgcgccggatcggaggcgaaagagtgcaccgagaccagcacgccggagcgcaccaggaaggtgcccagcaggcacagcgagaaagcggtgatcgccagcaacaccgtccaggctttgaacgtgccgcgtttctcggtcaccgccagcgaatgcatcagcgcggtgccggccagccacggcataaaggaggcgttctccaccggatcccagaaccaccaaccgccccagcccagctcatagtaggcccaggccgatccgagcacgatgcccagcgtgaggaacacccaggcggcggtggtccacgggcgtgaccagcgcgcccaggcggtgtcgagccggccggccatcagcgaggcgatggcgaacgcgaaggcgaccgagaagccgacatagcccatgtacagcagcggcgggtggaagatcaggccgatatcctgcagcagcgggttgagatcgctgccgtcgatcgggaagttcggcagcgtgcgggtgaacggattggaggtcatgatgatgaacagcaggaaaccggcggtgatcatccccatcaccgacagcacccgcgccaccgcatcctgcggcatcgcccggctgcacaacgccaccgccagcgaccagcagctcagcagcagcacccacagcagcagcgaaccttcatgcgccccccaggtggcggcgatgcggtaatacaccggcagttgggtattggagttggtggccacgtaggcgacggtaaaatcgttgaccacgaaagcatgcaccaggcacaggaacgccagcgcaatcgccgcgaacatgccataggtcagcggccgagccaccgccatcatgcggctgtcctggcgcgccgcgccccactgcgggtaaatactcagcagcagcgcgatcgccagcgccaggcacagcagaaaactgcccagttccggcatcatgacttggcgccctccgcctgcggcgcgttatacgcttccgccggccctttgtgattctctttcatcgcgtcggccacttccggcggcgtgtatttctcgtcgtgtttggccagcacttcgcgcgcattgaccacgttgccctcgcccagcaccccttgcgccaccacgccctgcccttcacggaacagatccggcagaatgccggtgtaggttacgccgatcgcgccacgcgcgtcgtaaatcttgaagctgacctgcagcgtattgggatcgcgtttcaccgagccgggcatcaccatgccgccgatgcgcagccgttggccgacctcgggcttctcgtggttttcgcccttgccctgcaggatttcccccggggtatagaacagatcgatgttggagcgcagcgcgtacagcatcagggttgcggtcagcgcgatgccgatcagcacaacgatcgccagataaaggcggcttttacgacgtggattcacaatgatttctcccgcggtgcggcggatttttgttttgactgttgcgcatggcgaatgcgccgttcgcgcgcctgacggcgaccgatctcggcgagcaactgccgccgctgccagacggtgtgcgccaccagccccaacagcgaaatcagcgtggcggcgaccgccagccagacataaaaggcataaccgcccatggcgaaaaacgccgaccaggaatcgaatgcggcattcatgactgacgctccttattcaccagcccggcgacccacgggcgctggcgctcctggaacaggatcagattgcgcaggcgcatcagcgtcagcgtgacgaacaacagcagatagccgaggatcgcccagcgcagcggggtgcgcatgcttggcgcgatggattgctgcatattggtcgaaccctgatgcaacgtattccaccattcgacggagaaatggatgatcgggatattcaccacgcccaccagcaccagaatgccggcggcgcggcccgccaggcggcggtcttcgaaggcgttatacaacgcgatgacgcccatatagaggaacagcagcaccagttcggaagtcagacgcgcgtcccacacccaccaggtgccccacatcggcttaccccaggcggagccggtcaccagcgcgataaaggtgaacaccgcgccgatcggcgccatcgccgccaccacggtatcggacattttcatctgccacaccaagccgataaacgccgccaccgccatcgaggcgtagatgcccatcgaccacatggccgccggcacgtgaatataaatgatgcggaagctgtcgccctgctgataatccttcggcgcgaagccaaagccccatgcccagccaagcagcaggcaggccgccgccgccagccccagccaggggataaagcggccgcagacgtgatacagccgttcaggccgcgccagttgatgtaaccatttccacattgtcgtcagtgctcacggtaatttttatgcgtcggccgcctcgagcgttcgaaacggcgaaaatcttctgcggggtacgctcttgccggccttgccccgtctgttcattcaatttgttagctagtgcacgctcactcgcagcgccgctgcggcggcaaacggcgccaatgtcacgctgcccgccagcatcgcgccgagtatcgccaggtaaccatcaatcggcatacccatcgcggcggcgtcgatcgcgccggtggcgaagatcagcaccgggatatacagcggcagcaccagcaggctgagcagcacgccccctttgcgcaggccgacggtcagccccacgccgatagcgccgatcaggctcagcgtcggcgtgccgagcagcagcgtccccgccatcgccagccaggtttgcatatcaagcgacaacagcagcgccaccagcggcgacaggatcagcagcggcaatcccgtcacgacccagtgagcacacacttttcccagcaccgtcatcggcagcggcgtcggcagcagcaacagctgctccagcgagccatcgaggaaatcgtcgcgaaacagccgctccagcgacagcagcgaggccagcagcgccgccacccacacgatgcccggcgcaatgcgcgccagcagctgcggttcagggccaatccccagcgggaacagcgtgatcacaatcaggaaaaaccacagcgggttgacgatctccgaccctttacggcaggcgatcttcaattcgcgacgcaccagagtcaaaaacatcacaaactccccgcgtcgtgttccgccaaacgaattttgcccaccgtttggctgacgccggccaaatcctgatgcgtggtcaacaataccatgccgccccgctgcgcatgttgttcaaaaaggctaatcaactcggccacgccctgtttatcgattgccgtcaacggttcatcgaggatccacagcggcgccgcgctgagccacaatcgcgccagcgccacccgtcgctgctgcccggccgaaagctgcgccaccggcagatcttcgtaccccaccaaccccacctgctccaacgcgcgccagatggcctgatgctcggccgcgccgcgcaccgcctgataaaactgcagattttcgaagggtgtcaatacggctttgatgcccggttgatggccgataaacagcaaatcttgctgatacgccgcgcgatcgcgcagcgtgttgcgcccgcgccagcacacctcaccgccgtccggccgcgccagaccggcgaggatgcgcagcaaactggtcttgcccgcgccgttcggcccttctacctgaatgatatcgcccggctgaactgaaaagcttagctcgctaaacaggatgcgttcatcgcgcacgcaactcagacttttggcttccagcatcggggaactcatatttttctttgggatagcgaatcatagcataagcctttccccacacgcagcctgcggcgggcgcgccggggggccaatatggcgagcaggatcaagaatgcgcggaaaaaagcggcggattttaactcttgttacctttttctgtatttcgccgcatttaggctgggcaactacgcttaatgacgtgacctcacccttattgagcaggagcgacagcatgaacgaacagcaacgccaggagcacgagcaggatgagacgatgcgggtagagagcgaagagcaggaacagggcaagcgcgaaatcgaagtcagggaagaaaatctgccgtcgcgcgcggcggcggtgcatgaacagatccggatggaaggcgaaaaagagctggagcgcgacgggctggcattgctgtggtcggcgatcgccgccgggctgtcgatgggcgcctcgctggcggcgaagggcattttccacgcccgcctgccggacgatcccagccgtttcttcctcgagaacctcggctacaccttcggttttatcattgtcatcatggcgcgccaacagctgtttaccgaaaataccgtcacggcggtattgcccatcatgcataaacccacgccgcgcaacctgctgatcctgctgcgtctgtggggcgtggtgctgctcggcaacctgatcggcaccgggctggcggcgctggcgtttacccatatgccgctgttcgacgccgggacgcgcggcgccttcatcagcctgggcgaagaggtgatgcgccatacgccgggagaaatgttcgccaacggcatcctggccggctggatcatcgccaccatggtgtggatgatcccggccgccggcgcggcgaaaatctgggtgatcgtcctgatgacctacctggtagcgatttgcgatttgacccatatcgtggtcggttcggtagagatcctctatctggtgttcaacggcgcgattgggtggcaggaattcgtctatccgttcgccctgccaacgctggcgggcaacatcatcggcggcacctttatctttgcgttgataagccatgcgcagatccgcaacgatttgagcgcccaaaaacggacggagcggcagcaagaggaaaaacggcgccacggcggggaaaaaccgtgatcgccgtcggtcaggcgaggaaatttcggcgctaactggcgaggtattgagcaaacgcaccgctaagcgcttattctgcgggtaaaaaaaggtataatgccccggcagcttcggttgccagcccgcagcgtccccgtagttaaacggatataacaagcccctcctaagggctagttactggttcgattccagtcggggacaccattatttattatcaagccattccccatcatcggcacccgcaatcccccttctccacgcctcagatccgatttcccccgcgcgttatgatgggcgttaattaaaaaacttaatatccgtcggcgtagcaatcgtcgccgcctcgcctctggccttcaactcgcccgtctcatcatcgaaatcgaacagcgtaacggtattggtgaacacattcgtgacataaagatggttgccggtggcatcgaaagcgagcgcacgcggttcaatgccgccggcctcatagcgcctcgtctcccctggcagcccatccccaccaatttttaatatcagcaaatggttatcggcaccgcgattggtggcaataagatatctgccgctcgggctgaggataatggctccgccgcttttcgcctccgctgaatcctgcccgccgttcagtttcactttcccttgttgcgtcaatcgatggtcgctgacggtaaacacctcgatttcacccgccatttcggtgatgacataggcatactcgcctttcggcgagaacaccatgtgccttgggccggcgcctggcgcaaagctgacatcgcgcgatgcgtccgcctgcagcggctgtgcgctatccgagcgatagcgataggcgtgcagcttgtccccgccgagatccgccgcatacagatatttaccatcgcggctgaaggtggttgagtgcgcatggcccccttcctgacgcccctgcacggcgccagaacctgatataaacggataatgctgcacctgttcacccagtttgccgtcactgccaattggcaataccgtcatccccgcgccgcctttggcgacggagtagttggcgacaaacagaaacttgccatccggactgagggtggcatgcgtcggctgctggcccgcactgctcaccgtattcagcacccgcacgctgccggcttcgtctattgccaaggcggtcaccgttcccgcgttctcctcattggtggcataggcgaaacggccatcgcgagattttacgatccacgatgggctgttcattttaaccacgtcgagcagcgttaacgtgccgtcgccattaaccgccaggcgatagagcccttcactgggtcttgccggtttctgcaccgcaggcgcattcggaatatgggtccaggtaccgactaacgctatttgctgatgttcccgattattggccatcgcatttcctgaaaacatgagagaaattaacaccgcagttaattgaatggcttgccagcctgagccggcaacgattgttcgaccaagttcagacaatatagaaggtagcataaagcgagctggatggcgcttattaatcgagtcgagagttttttctctattcatgatatcttcttgcctcatcactatgtcacaggaataagtatatcgacattgacaaccttgccatttagatcctcttgcctatataactctataaaaaagctctccctcattttgacattgatggcaggcagataagcgtcatacattacatcgaaaaagtcaatatattctgaaagctcccccgtaaaggggatgacaatatatttacccatagggatatagaagttaaagatggaatgaaaaacctcttgccccttgctgttggaatgccatttattactcctgttcttttccacattacatcccccccgctgcttgcttaaccatttttcattggtccgtgcaatgtcgccggtatctctgaattttcttatagaatgaaaaatcagtgatttgtaatgctttaacatctcaatgtcatccggcatgaccgtgtggtagaagtaaggtttcttatcgttgccatacggcgggatctgcgtggaaaaatcccatccccggctgtttctaaagctgttgggcgtttcgccaaagaaacgtttgaatgcccgcgtgtaacattgctgagaggcaaacccggatgccagggcgacatccaatatgttcccttggtgctgtttgagcagaatagcagagcgactcagttttctattccttatataagtccctaacgttataccaaaataatgcttaaacagccgttgcaaatgccatttagagtaacctgagataatggaaaccttttcaactgtcagcccctcgacaatattcttttccatatactccaacacctgcaaaagaatatcttttctgtaatccatatgtgctccttgcttttataagattcgcgtcctttttattaaaatcgttaaccaaccaaaccaagtcattaagattaatcctaaaaaaaaccagcctgtcaattcatttttttcggcataggaaaaactatcgcataaataactgaaaatgatcatgttatataaatctctccgcaagaaacccataaaacaaaatcaactcgcgtaaagtgcactcatcaaagatgcacttgccacaccaggcagaatcacactttttgataattgttttaccttaaagtgttttttacagccagattgcatggccgaataggaatttcatcatcacaaatgaaaacgcattttatatgcctggcccgccgataaaacgtactgcgaaagagatataaagtatgaccgacagtaaaagaagacgggagggataagctcaaggctgaacatcggtctcaataatctcgcgtcgcgatagcgcgtttcttttttatcgttcctgcgcagagaaaacggatattttaacaaaccttgctcgatgccctgttttacaaaccgcgcccattgggaaccctgcctactcccatgaatcgcccatctctcccccggtaaaatgccgagccgactcgcccgcgccttgttgtcagaacggcctgcggccgcaaacaaaaagcccagcacgcgaggctgggcttttcattaacggcctgattaatcagccaggttgtcgatctctgcggacctgtgcttgcgcaacaggtacagcagcaaagatacccgccgctcggtgcgttccggggtatccggcggcaggttgtagcgcaaggtataacgctcgttgttctcgttgcagaaatcgatgacgagcacgggagcagaggcccccgctacttttcgataattcagcgagatgcacgacaggttttttttcatctcaacttaccgcgacagtgcggcgggttgattcggcaatccgccccacgccggcgctcaacgcagcgcccaacagcagcaccaacagcgaaccccacgcggcgcgagacagctgtttggccgcttcatcggccgcttcacgcgctttctgctcagcctcggccttgagtttttccaccttctgcgccgcctgctggtaagcctgggcgtagttatcgacgatttggctcgcttcatcgcggctcttgccggtgcgtgccgcaacgatattcaccagcgcgtccttatcggcggcgctcaacgccggctcaccggactgcttgacgcgctcgaaccactgcttaagctcggtggcggactgcgccggatcggccgcggcatccacggccgactgtttgccgtcggcggccgcccgattggctctctgctccaaccgagcaggatccagctccggcttaccggtctgcttaagggtggcgttcaactgattttccaggcttccccagtcaaggctgatgccctttttatccagctgttgcttgaggccttcgcctacgtttggcgctgccgccgccaggccgctgcctgccagcgaaagccctttacccaccgcgcttcccgccagccccactacgccgctcgccaatgaaaccatcagccaggtggtcaacaaggtggtgatcgcccagctcagcaagccatgcaagccgccgcgattcggtgcggagcggccggcgacgaacgcgcctgcggccagcgatgccaacgttgaaaccagcagccagatcccggtgccggtgccaaagccgctcagcgggttgcccttttgcatcatatccacggcctgggcaccaatagccgtgcccagcacgctgaaggtcagataagtcaccagcgccacggcactcccggccaatatcgagccccatgacacctgaaacgctaagcgatttgattcatagacagtggtcatcgttgttccttatattttctggacaagtgattgcacgcacggcgggtaaccgcgcagacaaattcagtctgccgcgcggcgtcgtcggccgtcccggttcatttgcatcagaatgcctggtgcatttataccctgcgaatacgcacgttatgcactaagctgctcagcgaatagcgtaacccgcggccgccttaagaggccgcccccttctgtctagcggagaacacatgagccaatccgttttggccagcgaaacccaccgcggccacctgcagcaaatcatctccggcttgtccgacggcgtgatcctgacggataccgatcaaaccttgctatgggccaacgaggccgcgttgaccatgcatggcgtgagtcatcagaaagctctgggggccaatgccggcgagtacgcggcgcgttttgccctgcgctatcgcaacaatcatccgctggttttggaacagtacccgctgaaccgggttgccgaaggcgaaaccttcaccgatgtggtggtggaggttcggcaggtcgacgatccggacagcttctgggtgcaccgcctgcggagcctgattatcaccgatgcgcaggggcaaccggagctgctggcactgatcctgagcgacgcgacggagtgggccagcgccgaacagcgctttgaaaaaaccttcaacgccaatccggcaccggcagtcatttgtcggctaagcgacctgcgttacgtcaaggtcaaccaggggttccttgatatgaccggttaccaacgtgaacaggtcatggggcgttcggtttatgaactcgacgttttggaacaggcggagcacaaagaactggccgttcagcgcctgggggaaggcgctaccattccgcagatggaggccgagctgaagctgcccggcggcggaagcaagctggtggtggttgccggccaacccttggatatcaatgaagacgactgcatgctgttcacgtttaccgatctcgaaccccggcgccaggcggaatcggcgctgcgagaaagtgaagaacggtttgccaaggcatttcgcctgagccctgtgccgacgttgttatgtaccgcgcacgagcggcgcgtgctggatgtcaacgaagccttcacccgcaccaccgagtacgacgccgaagacttgatcggcaagacggtcggagagatcccgtttattgacgatccggaggcgaaccgccgtttgtttgccgccctggaaaaaagcggcaacgtcgaagggctggacatccgggtgcgcaagaaagggagcgagtcgattgactgtgtggcctcggcggatgccgtcagcatccacaatgcgccctgttatctgctggtgctcatggacattaccgaacgcaaacgctcggagctggagctggtaagcgccatcgaagaagtgatgcaggacgcctcctggttcagccaaaccctgatcgaaaaattggccaacgtgaaaagcatcaaccggcccgaccaggctggatttaccgccagcgatctcacgccgcgcgagcgcgatgtgctggaattgatttgcgaggggctgccggacaagaaaatcgcggcgcgtctcaatctggcgctcaacaccatccgcaaccatgtcgcgacggtctattccaaactcggcgtgcatagccgcagcgaagccatcgtctgggccagagaacgcgggctgtttaccggtgggctggccttcaggaatggcaagtagcctgcaaatgcactacccaaaccgatgcaaacgccccttataggccaaaagtgaagtgcataacatggcggtgcaaatgcaggcttccgtcctgtgcggaagccaaacggatcgaaccttaggagcgcatcacaatgaacagcgaaaaagccaatggcatgatggaaaaagtggcgggcaaggcgcaggaaatcgcgggcgacgtcaccggcaacgaacgtttgcaggccgaaggcgccgcgcgccaggcagcgggcgtgctgcaagaaaaatacggcgatgccctgagctgcgccggcaacatgatgaagaaaaaccccctcgccgcattggccctcattgccggcgcaggcctgttgaccggcctgctgctgcgccgccgttgatgcgcgccggcgaacaaaccgcttttccctgaatgccgcgcccggtgggtagccaccgggcgcggttctatcggcctgagggacgcagtattatcgattgatgcctccgctcgtttaccgctggaattaacgcgtattctgtgtcgccatgcgacgaattattgcggtgaaaccgctatatcccgcagggaacatgagcctttatcgttcaggctgccgcacaccgtctttactcgctgcttataccgcacgtctttttattatattcgtcctattgcagattatcatcaccctctcactcaacgcgcccaccgcctgttatttccggttgttatgcaagccagttaattcccctgcaacataacgatatttctcagcgtaaaaactgaatatatcaatcagcctgggtttatcctccgcgccattaaatgttaatattgccggattatgcgcatggagaaatagcatgttccccagtaaaaaacattcgcagcgggcgaccccgctgaccagctatcaattttcccggctgcatactttcgaatgcgtcgcccgtcatttatcttttgcgctggcggcgcaagaattgtcgatcacccccagcgccgtgagccaccgcattaatttgctcgaaaaggaattgggttttctgctattccaacgctttcatcgccggattacgctgacgccggagggcgaacgcatgcaatgggcgctggacagttccttcaacaccttgaatcaagaaattctggacatcaaaaatcgcgagttgacggggaccttgaccctctactcgcacccatccctggtgcaatgtctgctgctgccgcgcatcggcgactttatcgcccagcaccccaccattcacctcaatattctgaccgggcaggaaatcatcaacctggccaaccgcggcgtggatctggcgatgtacttcggcaaactgccctcggggcggcatctggacgaagcctttatgcaggaatcaatggtgccgatctgcacgccgcagtacgccgccacgcataacctgtacgatgcgccggaaaacctggccctctgcacgctgctgcacgatcgctacaactccggcgaagatgagtggcaaacctggtcgcaacactttgcgctggggctggataccgacagtaaaagcatggagttcgaccgttccgatcttgcagtgctggccgcgacgcgacaccttggcgtcgccatggggcggctcaatctggtgcaggactggatcaaaagcggcgaactgatcattccgttcaccgacatgaccgtgccctgcgagcactgctattttacctcgaccatctccgagcggcagtggccgaagatcctcgcgtttaagcagtggatcatgaaaatctcccctctggtctgatggccagaggattatcgccatactttgggggaataagaaaaatgcagcgcgcaggcgtagagccggccggcctttgaataagagatatttttgcggtttttatcccaggtcagcagagaattattggcaaaataataaacctccaattgcatcccattagccaacctcgaccaacctcggcttcttatcacggtaaaatcaccgttatcgctgagcgtaatcagcggcacgccccaggcatagcgggatatttgcagctgaataatgaattggctttcgcagcttatttggtagttctgtacatcaacatccataatttatatttttggtgccacccttcggtcaacataaataagatatgaacaactcactacgactaaccccagtacgatcaacacagcacccaatacaaattcaatttgcaacggttcgccgagaatgacggcccccgccaggatgccgaataccggcgtcataaaggtgagaatgcccagcgaggaagcctgataacggcgcaacaatgaaaaccagatcaggtagctgaaaaacgacacgatcaccgtttggaacaacaggctgctccacgccacggggctcaggacgacgtgcaaattgtccgtagccagcgccagcagcgacagcagcacacaggcgcccgtcaactggaacagcagcgtctgtttggccgggcactccgccaggcgcgtggtacggatcaccagggtagaaccgccccaggcgatccccgccagcaggccatagaaatcgcctttcagccgatcggtcccgccgctgccctcggccatgcccgatatggccagcaccacaccgccaaaggcgatgagcatgcccagccactgcaccggcgacagacgctcctgacgattcaggaaatgcaggccaagggcagaaaacagcggcgcggtgtacaaaaacaccgccatatgcgaggcgctggtatagcgcagcccttcggagacaaaaaagaactccagcgcgaacaatgctcccacgctcagaccggcgctcagcgtggcgcgatcccaggtgaaacactcgccgcggcaacgcgccaacaggtatacccccagcgcggcgagccccgaacgaatggcaatttgcagcaccgccgacacatccgcctcggcagccttgatcgccacctgctgcattccccagatagcgcaaagcatcaccatggcggcggcagccctgccgtcaataccgattcttgcattcataatagggttctcgtcgccgttgaaataataacaggctgccgtcgcgttattctttatacaccacgatttcctgataaagtttaataacctcgccgtcgctgtcgacagagtcggtatattcagtttgctgcgccaaatgaatcaccttccatcctttgcgcgccagttccgggatcgtcaggcgccccacgccgcggcaggaaaacagggtgtcgtcagacaatctgagcttactaacctctgcataatcataagcttgagaatgacaaacgtgcgattccgccgccatcgccggtaatgaaaacagccccaccaacaacattaacagattcctcatggcgacctcccaatcgcttattcctgccgaccgattacgcagaaagcggctaacgttaatacggcggtgacaggctttaattaattatctcttgcacggataaaattacaggctgacgccgatgactgacaaatgaaaaatataaaccttggcgttagatgaattcatccgaatcgaaaggcatgaaaagcggcccttttcaccgcacgaaatggtcaaaaaccggccaataattagcaagaaaagtaattatttattttaccgtttatgttacaaatgccgcccgccgctaaaacaccaaaaaaaccgtcaaaatgcgtgaaaacgcagcgttctgcgcaaaacatcggcatggcggcgctgatgggggcggtcatacataaaacagggataacacatggcaatgaaattgcgcgtattgactcaagcggtggcgctgggtctggcgatcggcagcgcgtcgttcgccgctcaggcggaaatcaccctgctgaagcaggatccgcaggctggcgatccgctcagccgcctgaacttcaccgttggcggcagtatccgtccgcagttcaacaacatgacgggcgacggtgacaagggctcctacaagcgtaacggcttcgacggcggcacccgcttccgcttcgcggcggactactacctgttcgacgatatcagctggatcagctactacgagctgggcgtgaacattccggcgctgttcgactgggatcaccactatgccgacggcgcgagaaacaccagccgccgcatgctgtacaccggcctgaaaagcaacacctggggccagatgaccttcggtcaacagaacagcgtttattatgacgtggtgggcgccaaaaccgatatctgggactacgacatgctggcccaggcaccgggcaacggcatcaacggtgactacgacggctcttaccgctcacgcaaaatgctgaagtacaagaaccgcttcggcgatgcggacgtttacgcttcgtacctgttcagcgacagcgactatctgccgggcaacggcctgcgctacaagcgcaaaggcggcggctcactgggcgtggattaccacattacgccggacctgacctggggcaccgcctggaactacacccgcgccgaaatgcgtaatccgtccaccagcggcagcaagagctatgaccagaacattttcggtaccgccatcagttggaaaccggacaactggaccctcaccttcggcggcggttactacaacgacttcctgaccaccaagaaagccgacatcaataattacttcgccggcgacgcatggggtatcgaatacctggccggttataccgtgccggttggccagtacgcggtgaaatcggtgatgccgtacttcatgggcgaccgcctggaatacatcaccggccgcaactaccagcgcatcgacaacggcctcggggttaccgtgcagtttgactacggtttccgcgttgacgtggagcacgtgctgacatcgagcaccgacaacctcggcgatatgaccgtggtgcgcctgcgctacgatttctgattgctcagaacgcaaaaaaggccgcgcaagcggcctttttcgtttattgacgcagcgtcagaagccgccgcgcgccgagcgcccgaccgcctcgcccagctgccataccgccatggcgtaatgggtgctgtggttatagcgggtgatgacgtagaagttcggcaggccataccaatactggtagccggtgccgatgtccagccgcagcaggctggcttcctgattatcgccgagcgagccctgcgggcttaggccggcttccgccagcgcggcaaccgagtagcgcgtcttgaagccgttttccagccccggtgcctggccgttggcctgaatggcgaccggttcgcctttggaccagccgtgcgccttgaagtaattggccacgctgccgatggcatcgaccggatcccacaggttgatatgcccatcgccgttgaagtcgaccgcatagcttttgaaggaagaaggcatgaactgcccatagcccatcgcgccggcaaaggagccgcgcagttcgagcggatcgtcgccttcggtgcgcgacatcagcaggaaggtttccagctcaccggcgaagtaatcggcgcggcgcgggtagttgaaggccaacgtcgccagcgcgtcgataatgcgggttttacccattacgcggccccagcgggtctccacgccgataatccccacgatgatctccggcggcacgccgtacacctgccaggcacgctgcagcgcatcctgatattgattccagaacaccacgccgttttgcacgttatccggggtgatgaacttgttgcggtagcgcagccaggagccattcggcccggttggcccctgggtagacggcgtcggcgcctgcctgtccatcagccgcagcaccgaatccaaacgccgtgcctgcgccagcacgtcgtgcagctgctgccgatcaaagccgtgttcctgcaccatcttatcgataaagcgcgcggtattcgggttattggcgaaatccccccccagcggcgcgccgctgtgcgccgggctcagcaaaaagccgccctttaccggggtgctctgcggcgtagcggtggtactgggtttcggcgtgctgctacaggcagcaagcaaggtaatcagcggtaaaagcgcaaccaggtgacgcatcggatatccatatagccatgcaagagataagtgggagttatgttaatgcattgttcaacgcgaacaaacaggattatgccgccaattaccgcgccaggtagccaaacgtgccaaattgtgacgttttgcacggtgaagggacgcccgatgcggccgcgtggaatctcaaccgcaactaaatgagaaaaattatcaccttgacgcccgcatttaccccgataaaatgcccggctgcttgccatccggccaccgccgggcggtcaatgattatgacaacggattgtgatggactctctcggacaactcgccaaagacctttatcgtgggcgcatctcgcgcaaaccctttgttttttcgctggcgatcttcgccgttggcatcgtgctactgtcgtttctgtcgacctatctggataaaaaccattttcgcgcccatgcgcacggcgataccgaggaattcgtctcggtgctgctgtatctgctgtgcatcatggtgtgggcgctgttctgttttggcctggtggcgtggtttatggccaaaaccgcgtttcggctcaacgatatcggcctgcccggatgggcgctggccgtggcgtgctatgtgtgttcggtgctgaacaattactctcccggcccggtggcgcgctggctgccgctgttcagtctggcggggatgatctgcgccctgctgttgccgcccgacgggctgcgccgcaagccggacggcaacgctgacgattaacgcagctgcaccaccttgttcgctgccggttcggccgccgtcagcctgccgctaacctggctgataccgccgccgctgttgtgggacaccacggcgatcggcaaacgccgcaactgccgggtcagctccggcgtgatatagccgatgtgggtgttctgttgctgtttccgccagcggtcggccgccctgcgacgggagaaatactggttgtatttggcccaggcgatcagagtgacggcattgaacaacgccacaatgatatacagcgagatcacttccagcagcgacagggcggagcccaccccgtgctgatccatcaccgacatcaggccgcggctgaacagataaagaaagccgcaccaggcgaaaagcgtcagcaggctgtctaccacgcgcggcagcaggccgcgctcggaataaatcaggacgtccgtcattctttgatcctcccaatgccccggtcggggcttatccagcgcgcacgcccgcgccgagctttcaacatcactttggaaaacgccaccagcgtggtcagcaagctgagcagccaatacaccagcggataccagatgatccagaacaacgagcggccaaagcccttctcatagcgcttctccagcagcagactgacggtgaactgcagcaagcacaccacgcccagcaccaggccggtaaacgccggcgtcagcagcgagtgaatgcggatgccctccggcagcggtatcgccagtccaaccagaaaaatcagcacgctgaccaggtaagtgaacgcccacagcgtggagaggcaatactcggcgaacagcagccacatatgccggtgctcccaggcccacaggttgcgcagattctttaaaaacacctcggcgccgccctgcgcccagcgcaggcgctgcttccatagcccgcgcaaggtctccggcatcaggatccagcacagcgctcgcggttcgaagaagatagcccagtgcttcagctgcagcttccagctgatgtcgatgtcttcggtgatcatgtcctgactccagtaaccgacatcggtaagcgcttgcttacgaaacgccgcgaccacgccggagatggtgaacaggcggccataaacgcgctgcgtgcgcttgataaggccgatgatcgacgaaaactcaccgacctggatgcggccgatcagcgtggagcgcgtgcggatgcgcggattgccggtcaccgcgccgacatgcggattggccaacagcggcgccaccaaataggctgccgcatcgcgatccagcagcgcatcgccgtcgatgcacaccagatactcgctgcgcgccgccgctgcgcccgcctgcagtgcaatcgccttgccctgattttgcgccagatggatcactcgcagccgggggaactccagcgtcaactggtccaacacctcggcggtgtcatcgctcgagccgtcgttgatggcgatcacttcgatattgtcatagcgctgcgccatcgccgccgaaatggtttcacgcgcgttcaacccttcgttgaaacaggggatcagcacgctgatcgacgggttgcccggcagcgccggcgcgggcatgtccgggctccagcgccaatgccgctcgcgatgcagccagaaatagatgccgccggcgatccagatgccggacatgaacaacggccagaagaacacgaagttgagcagcatttcgccggtaaacagcaggacgatgccgaaaggcacgctcaacaccagacacaggataaataaggcaattaaacgatctgtcatggcagtgggaaccaggctgaggacaacaccgggcgaacggcgtccagcttaggccgatcgtcgaggaagttgtcggggtaataaccaaagctctgagcgccattgcgctgcaggcgacgcatccattcggccagcagttgaccgtcatccaggctgattcggcgctccttgcgccagtcgacagcctgcaactcaaacaccgttttatcgagcgcgccggggtaagcggccactttgcccaccagttgatccagccagcggccgctgtcggcgcgcggcacgttttccatcagcggcatcgccatcggcgctacccagtcgtaggcctgcaggaaatccgctaaattctggccgaaccaggcttcactggcgggatcgagtaccggcatcgcataaatattgcgcgcggtttgcacctgcggaccgcggatcgcccgcacccgttcggccagcgactgggtaaagtcgatcagcgcccggctcttgaagcgcgtccagcgcgccatcgcctgcggatcctgacgaatcgccgccaccgaatcggcgaaaccggcctggcgataggccgcaacggcttcggggccggcatcttcgaagtccgacagcagcgcatcgtcgtggaacaggatccctttgaaagtggcgtgggccgccagatcctcgtagatctcaccgatgcgctggcgcgccaccggactgaacggcgacaggcgacgatactgcttgtcgtctaccgacagctgcccgctttgcggatcgaggcgctgcacgcgcggcacgtcagaccccagctcgaacgccagcaccggcatccaggcatacacggccacgccggtgcgcgacgagagctgccaggagacccggttgaacaggtcggccttcatcggcagccagcggttggggaaatagagctcgcgcacgttgccgtcgccttttggatcggcgaacgcctgcaggaaaacggtattgatgcgcaggtcgtagatgcgctggatcagcttgtcgagatttttggcctgctgctgcggatcgggatcgtagaggtagtcgagatcgacgtgcgccacccgcatgatctgtcggttctgtatctgcgtcagctgctgggcgaagctcgtcagcgacggattgccggccaccagcatgcgcggcacgttctcaggcgcgttgacgtctcccagcccgttctccagcgtcagcgccatgcggtaaccgtgcttgcgcgcgatatccagcgccacgccgccggccgcaccgtacggccagacccacacgcgcggcgccttaccggtggcagcggtgatgcgccgggtgatcaacgccacgtccttctcgatgcgttggcggtattccgtctcgctttcatagcggccctgcttggcgtcgtacagccgattggcgaccgccggttcggtattgccctgcgggttggcgatgccgccataatgcgaggcgtaggtatgcgcgccgatctccaccagcccggagtccgacacttcccgcacctgctgccaggtgaggaagcgatcgcgcggcgtcatcaggccgccgaaatcgaccggcttgtcggccggcgcatccagccaaacgccgaccggcgccagcaccgccggccagttgtaggccttcagcaacgggaatacccggctgtagaagctgcggtagccgtcgtcgaaagtcagcagcaccgccttgttaggcaacgccgggccgccgttctgcgcctgcaggatctgttcgaccgaaaccggctgatagccgttttgcttcagccaggcgaactgttcgttaagcgcgctggtgcgcaccgacatgtagcgctggtccgccgcgccgtcttccacgtcgtgatacgccagcaccgcgtagcggttggccggccacgggcgttccattggccccacggatcgctccgccggcggcgtgaagcgcggtacgtccgcctgactgcaggcggtggtcagcaacgcggccagcactaaaagcgaggatcgaataagcatgatgattcctttaaaaacgataattcagatcaaacgtcacgccgatgttccgctcgcgtttgccgtcgtacggatgcttctcaaactgcagcatcacgccggcgtccagcactccgttccagctgacgcgctggccgtaacccagctgggtgatcggcttgcgcgcatagtcccgctgccagtagctgccggcgccggcctggaactgctggctccactcggtctgataatggcgatacagggtgtgatcgagcgttaacgacggcagcagcgtgaagtcgtgcttcgggttgtaatacggcacgttctcctggctgttgcggctgccggacagcgtcaggttcatgtccagccgataacgggcgccggcgagcagccgttgccgcccttccaggccgtattccagccggttgttgccgtccgagaagtgcgaaggcgccacgctggcgcgcagctcgcggctttcgttctgctgccaacgcagccacaggttgccgccgttggcgctgatgccgttggtcaacgcgcgcagcggcgtctcggccgacaggcgcgccaccgaaccgccgaggcgccattgatcattcaggtcataccaggatgagaggcgcaggccgagctcattgccgtggccgtagttgcggttggccacctcggcctccagccacagatcgcgcgagcgccactcggcaccggcgctgagatcgcggttgatgcccttgccctcgtcgaactggccggtgttgaatccccagccggtgaacagccgccagttgtcgtcgatcggcggtgaatagagcgcggcgtgtatgccgaaatcgtggctgccgctgaccggcccgtcggaatcgatgccctgattgccgctgatgcgcagttcagacatatggtgaatgcggcgcgaacgttcaaactgctgagcggcgacgctttccggcgcgcgctggatgacgtcgtcggccagcaaatccagttggcgccactcctgcaacccctgcgcgacatagccctgctggatctccaacggcaggctgcgcggctccagcccttccacctgtttcaactcctcctcggcgcgacgcggccagccgcgcgccaaataaacgctggccaaggagatgcgcagaccctgattgcccggcgccgtgcgcgccagatgggtcagctgccgttcggcctcggccagatcgcgttgataaacccgcgactgcgccaacagcgattggccgaccagccagtcatcgttgtaggccagcgtcggcagctggtacaggcgggtcgcgtagggatagcgctggctgacgcgctgcgccagcagcgccgcctgatcgatgcgttcgttctccgcctgcgcgtaaaacagatcggtttcgtcttcggcggtcaccgcctgcggtgcggcggcgttcaggcggccgaaaatggcctgcgccttgtccggctgctgcagatagaggtaggcggacgccgcccagtgctgggcataatccggcaccgtgcgcccttccgcctgcagggtttgatactcgctcaccacgtcggccattcgataacgcgccagcagcgcgccaaggcgatcgatacgcgcctgttggtagctgtcctgcgcctccggcagcggccgccactgcgtcagcagttggtcatagcgcgccagcgcgcgatcggcgatgacgaaacgttcctgttcgccgcgagcatcgataaacgacaaccgcaccagctcggcggcttcatccgcctgcaggcgccgctgctgcacgggcggcaatgtcagcccctggctttcacgcagcgccggatccgcaacccgattcgccgccagcagcgtcacgtaataagcctgaattccggtgtcggacggcgccagcgcgcgggcatgagtggcgttttccagcgccgcccagctgcggccggcggcctggtccacataggcgcgcgtcagataccacgtcgccggctccagcagcttctccgctttggccgcctccgtttgcgcctgcgcatcctgcccggcatccgccagcgtcatcacatagccacgctgtaagccgccgtcggcgggagcgagctgcaacgccgtacgccacagtcgcagcgatggttgccactgcttcaggttgcgataggcgcgagccgccgtcgccagactggcgctatcccgctgcagcgcggcgccgtcggcacgccaaagcgcgactacctcttcatcgtggccggcccacccggccacctggatataatcggctcgctgctgcaggctcaacccctcctgagcgcgccgctgcgataaatacgccagcaccggcgcagtatcgcccgatctggcctgacggatcagcgcgtcatagcgttcatccgccagcgcggtggccggcagggataaaccgataaacagcaatgacgccgcatatttggtagcgtggcgttcggtaaagcgtaatgaacgcgagttaactttaggcacgaggtattcctttaatccgtgagctgctgtcctggcaaagtagaaatgcgagcaggcacccgaaaagtcggctagagccgccgggtaataagcatggagtaatgaatatttctgtctggcgcacgcttaaatagaatcgaatgcgcctttgcctaaaaagagtattttataaatctgccaatgaataccgcagccaggtgatatctgcctgaaactggaatttcacaattatcaataagtgaaataacaaaaattaaaacaatataaatcaataagataaaatacattaatgatcaatattcttaatttcactctttcgtgtgaaattgtataaaaccggtgtgatatttgattttaattctcattatcaccggtcgacaggaatattaatccaaacatccaattaaataacctgccttgttggagaaaataacaagattattgttaacacgaacattaaatttgcctgctaataattattcaattcaatttaaattcccccacggatacattcatgctggctatctcccgagcatgccgtcacaatagcgtctcattctggtttcaatcagggattgccatgtacagccactaccccgcccattacaccttcgatagcgacagcgacgcctggcagatcggtttccacgacttccccgagtggcaatctgcctgctataaacgcgaagacatcgagctggaagcgcaggaaagcctgctggccgccatcgccgccgcgatggatgaagggctgcccctgcccgccccttctccttcgcaaaccgatgacttgagggtacatctgccggcgctggtggcgctgaagatcgaactgcacaacgcgatgctgcgcaaaaacaccggtaaagcggcgctggcgcgcaagctgggtttcaacggcgggcaaatggagcggttgctggatatcggctacgcttcaaaagtggaagcgctggagcaggcgttgtatctgctgggctacgaagtgcgcgtgacgataagtgaagtttgccaataagttagcggcaggtaagcgaaatattatccaagggggctaaatttcccccgttttgcgccgatatgatggctacctaatcacttgtcgcaacaacgaaggctaaaaatggagtggagtcgccgtcatatttgggccgttattctgctgtcttgtctcgttttttgggtcattttggcgaccggcatcaacgccgtcgcctgagcgcctgccaccgtattgcaatacccgattttaaagcccgccacacggcgggctttctgttcacgacgtatcgctaactggaatgcgtggtaaagttcttacaagaaaaatcaagcaaattctcagtgtgccccgtattgtttttcatcgccccttcctcgtcagccaataaaataaacccttgttgtttatcttcaaaagtaacggggacgaccgccacaccaaactttctcatatccgcgttttttttaatcagatcatgacctatattgataaatggaaacacaccgtccaaatccgcttgccttattcgcatacctaaataatgttgcccaaccaagttgtctttcaacggtgtccattcatccccaatattaggtagctggcggtctatactgcgtctgacatgcggtttcaagcatgaaatgtgaatgtgcaattgcccttgagtacggcctcgctgcgagtttattgttaaagcataagcttctcgtggcaatgaagagccataaacctcttccagaacatgtcgattctgccaagccaacgcaaaataatttggcgtatcagctaataacagttccggactttcgactcccgccattttcaacgttggcacgagcaaataatgatagcggctttcaagatcgcgtacgatggcatagccacgagcgacaccttcatccattgaaactttatcgcagggaaatggtgttcctaaatattgatagttaaacacacatagattattcactacgcgccacaaagcattactggcaaaagcagacggcggggtcgctatcaaaaaaagcaccgatgctttaaaaaaaaaccttaataacaacaaattaaaaatccttttcgattgtagccagcctacgttacaacgctatcctagcgtcgaaacttactataggtaaacataaataaaaagcgttataaaacagcgcaccctgttcaaaaaacagcctcaaattgtgatcaaaaacacagtattgaaatcagaccagtattgagagtacattagcgccgatcctgtcgcggttcggattttacctcacggagcatgaggcgcgacaaccggacaacccgcgctcgaggacgttgttcttccgcttggaagaatccgcccgacaagcaggttgcccataaaatactcagcacaacaatcgggatcattgctggcgaggactccagacaggagttgttcagtgaaatattttttgatgggcgtgtcattcatgctggttgcctgggttggcaccttcatgttgatggttgcctgacagcagccacaccaggaacacagacaaagggacgcgcaagcgtccctttgtcgtttcggctagcgctcatttgcccggcatcatgcggcgcagggtgtcgtccttgcgcaggtagtggtgatacagcgccgccagcgcatgcgcgccaatgataaagtagccaacgtttgccagcgtctcatgcaccgttttgaccagcttacgcatcaccggatccggcgtcacccactgcggcatcggccagcccagcaaagaccacgatttcccaccgtaggccagggttaacatgcccagcagcggcaacatcaggaagaccacgtacagcagccaatggaaaatcttcgcgcctacctcctgccactcctccagcggaggcgtggttggcggcgcagcgtggaaagagcgcaccgccaaccgaatcagcatcagggcaaagaccgataccccaaagttgaaatgcagatttttgaccatcggcgcccacgcctccggcaccgaatctttcagcaacatcgccgcataggtgaggatcaccatcagcaacgtcagccaatgtaaaacgatttgcgatcgcgcgtagcggttgctcatacactctgtccaaaaaataaaattcagcgtagttgagcataatggggaaataatgaagaaaaccttgggacggaaaaaataaggccgggcgaacgcccggcctgacagggttatttggcgctgccggctttacccggcttcagcagcccgtccgcgcggaacatcgccttgatgccgcgcaccgcctggcggatacgatcctgattctcgatcagcgcgaagcgcacgtgggtatcgccgtagtcgccgaagccgatgcccggcgagacgcagaccttggcttccgccagcaggcgcttggcgaactccagcgaaccgaggtgggcataaggctcggggattttcgcccacacgtacatcgacgccttcgggttttccaccatccagccggcctcgtgcagccccttcaccagcacgttgcggcgctgccgatactgctcggcgatatcgcgcacgcactgctgatcgccttccagcgcggcgatggccgccacctgcagcggcgtgaaggtgccgtagtcgtgataacttttgatgcgcgccagcgcgctgaccagctcagggttgccgaccatgaaaccgatgcgccagccggccatgttgtagcttttcgacagggtgaagaactccaccgcaatgtctttcgcccccggcacctgcatgatcgacggcgctttccagccgtcataaacgatgtcggcataggccaggtcgtggatcaccagcacgttgtactgtttggccagcgccaccacccgctcgaagaaatccagctccacgcactgcgcagtcgggttggacgggaagccgaggatcatcattttcgggcgcggaatggtttcccgaatggcgcgctccagttcactgaagaaatccacgccgtccaccagcggcaccgaacgcacctgggcgccggcgatcaccgcgccgtaaatgtggatcgggtaactggggttcggcaccagcacggtatcgccgtgatcgagggtcgccagcatcaggtgtgccagcccctctttcgaaccgatggtgacgatggcttcgctttccggatcgatatccacctgataacgatcggcataccagcgcgaaatggcgcggcgcaggcgcggaatgccgcgcgaggtggaataaccgtgggtgtcgtcgcgctgggcgacggcgcacagtttttccacgatgtgcggcggcgtcgggccgtcggggttccccatgctgaaatcgataatatcctcaccgcgacggcgtgcggccatcttcagttcggcggtgatgttgaatacgtaagggggaagacgttcaatgcgcgtaaaacggcgctgtggactgttatcagccataggggattcctcgataaacgttagcgcccggaccgtccgagcgacgctggccagcgaactgaccgaatatcgaacatagcgcagcgccggcgagcttgtcgatacccggcgcgatatttttatttgccgccctgaaactccgccgccaacagcccgaacagccagtcgtcgcgccactctcccgccaggcggaaattatcgcgcagcgtgccttccagctgaaaaccacacgactccagcaggccgcgcgaggcgaggttgccggaggtcacggtagcggtcagcttgtgaaaaccgcaggcgttcaccgcaaaatccagcaccgcccgcagcgactccttaccatagcccttgccctggccggagggcaaactgccatatcccacctccgcctgccgatacggcagccactgcgggcgaaagccggtaatgcccaccgcctccccgctgtgcttctcacgcatcaccagacacagccactgatcgccgtgtttgtcccaggccggcagccgcgcgtcgaaacgctcgcggatcgccgcttcgctgagcggatcggcgatatagcggatcacctcaggatcctggtaaaggcgcagaaacagcggccagtcctcggcggttatcgactgtaagtacaagcgttcagtgaccagcttcataaaatctccgaaaaacgaaaaagaggaacttacgaatgaaagatatctctttattttccccgattggttgccgataatcattcacgttaaaaccacaaaaccataacgtcttgcccgattccctacaaccgtccgccgcagtgactcacgcggcaccaggagaacaccatggcctctttagtcatcgatgatattccgcagacgatcgttaacgtcaagcgccagctgcgccaggccttgccgaactaccgcgaagtttttctggcgctggaggagaacatccgcggccaggtcgaccagatccgccacgaactggccgccggccataatccggtgccgcagatcgacgcggaagatatcctgcagcagcgcgtcagcgatcaacagatagcgctgatcaaacagcgcggcgcctgcgccattcgcggcgtgtttccccgcgccaaggccgaaggctggaaccgggaaatcggcgactatctcgagcgcaacaacttcgtcgagcggttgaaaaacgccgccgaagacaactatttcggcaagctggccgccagcaagccacagatttatggcatctattggtcaaagccgcaggtcgaagcgcggcaggatgcgcgcatgcatgcggtgcaggtgttcctcaacggcctgtgggccaccgaaagcaacggcaagcagcatttcgatccgacccgcatcgccacctacgccgatcgcactcgccgccgcccgccgaactcctcgtcgctgggcctgtcgccgcacgtcgacagcggcaccatcgagcgctggctggacgagaatttccgctatgtgtatcgccacgtgttctccggcgactggcagcagtacgatccctttgccgccgacggccgcaccgaagtgcgcgaaatagcctccccggcagtctgctcgatgttccgcaccttccagggctggacggcgctgacgccgcaacgcaccaacgccggcacgctgaacctggtgccgatcgccaacgccatggcctatgtgctgctgcgcgcgctgcaggacgacgtcgccgacgacgatctgtgcgatgcggcgccgggccgcgcgctgtcgatctcggaaaaatggcatccccttttattaagtgggatttcccctattcccgatctggagccgggcgacacggtattttggcattgcgacgtgatccacgcggtggagaacgagcataacggcgagttcgacagcaacgtgatgtacatcgccgccgcgccgggctgcgcgaaaaacgacgcctacctgcagcgtcagctgccgagctttatcgacggcagaacaccgccggacttcgctcccgacgacttcgaagtggattttgacggccgcgccaccgccgatctgctgacgccgctgggcaaagcgcagctcggcatgcgctgaccgccggcctgagccacgggcctttctcgctgtggtatactgccgccatccgtaggccgcagcgagaacccgtcgtgcaccctttttttgaaatgctgttggcggtgtttgatcgcgccgcgctgatgttaatctgtctgttttttctgacccgcacccggctgttccgccaactgctgcaaaaagaagaccatacgccgctcgagctcggcatcgtcacggcgatcttctcgctgttcgcgctgttcagcacctactccggcatcaacgttgagggctcgctggtcaacgtgcgcgtcatcgccatcatggccggcggcatcctgttcggcccctgggtggggatcgtcaccggcatcatcgccggggtgcaccgctatctgatcgacatcggcggcatcacctcggtgccctgcctcatcaccagcatcatcgccggcatcagcgccggctacatcaacctcaaggtgagaaaagagcagcgctggcgcgccggcatcgtcggcggcatgctgtgcgaatccctcaccatgctgctgatcgtgctgtgggccaagccgaccgagcttgggctcgacatcgtgtcgcagatcgcgctgccgatgatcctcggcacggtgtgcatcggcctgatcgtgctgctggtgcagagcgtcgaagatgaaaaagaagtgatcgccgcacgccaggccaagctggcactggatatcgcccacaagacgctgccctattttcgcaacatcaacagcgaatcgctggccaccatttgcgatatcatccgccaggacatccgcgccgacgcggtggcgatcaccgatacccatcaggtgctggcttacgttggcgtggggcgcgaagcctacccgatcggccgcgaagggctgagccgcgttacccgcgaaagtattcgccacggcaaaatcatcatcaaaaacaacctggaaaacccggccgcgccgcagatccattcgcagctggtggtgccgctgtgggaaaagggcgaagtgaccggcgcgctgaaaatttactactgccacgctcaccagatcaccaacacgctgaaggtaatggcggtcgggctgtcgcagatcatctccacgcagatggaggtttcgcgcatcgagcatctgcgccagatggcggataaagccgaaatgcgcgcgctgcagagcaagattaacccgcacttcctgttcaacgcgctgaacgccatctcttcctctatccgcctgaatccggacaccgcgcgccagctgatcatcaacctgtcgcgctacctgcgctacaacctggagctgaacgacgaactgatcgatatccgtaaggaactgcatcagattcaggactatatcgccatcgaacaagcgcgcttcggcgccaagctgacggtgatttacgacatcgacgacgacgtctcggtgcgcattccgagcctgctgatccagccgctggtggagaacgccatcgtgcacggcatccagccctgcaagggtaaaggggtggtggtgatcgcggtgaaagatcagggcgatcgggtgaaaatttcggtgaaggataccggccacggcatcaaccaggaaaccatcgaccgggtggcgcgcaacgagatgccgggccacaatatcggcctgctcaacgtgcatcaccgcgtgtcgctgctgtacggtgaagggttgcatatccgccgcctggagccgggcaccgaaatcgcgttctatatcagcaaaaacggcggcaagctgcatcaggaaccgagcgcgccgccggtcggggaggcctcatgaaagctatcatcgtggaagacgaattcctcgcgcaggaagaactcagctacctgatcaagaaacacagcaatatcgatatcgtcgctaccttcgaggacggcctcgacgttctgaaatacctgcaaacccaccaggtcgacgccattttcctcgacatcaacatcccgtcgctggacggcgtgttgctggcgcaaaacatcagcaaattcgcccatcgcccgtctatcgtgttcatcaccgcctataaagagcacgcggtggaagcgttcgagatcgaagcgttcgactatatcctcaagccctatcacgaggcgcgcatcgtcaccatgttgcaaaaactggaggcgctgcatcatcgccccgccggcgcgacggagccggccagcgcgccgagccgcggcagccacagcatcaacctgatcaaagacgagcggatcatcgttaccgacatcaacgacatctattacgccgccgccgatgaaaaggtgacgcgggtctatactcgccgggaagaattcgtgatgccgatgaacctcaccgagttttacggccggctgccggaagagcatttcttccgctgccaccgctcttactgcgttaacctggccaagatccgcgagatcgtgccctggttcaacaatacctacattctgcggctgagcgatcttgagtttgaagtgccggtcagccgcagcaaggtgaaagaatttcgcaagctgatgcgcctgtaagcgcttaccagcgcgggcccggacggtagtaatagccgggcggcggtggtggcggcatgcggtaatgcggccgatctcgccagttgcgccgcggcggcccgtagtaaatcacccgtggcggcgggccataatagtacccgcgcgaacgttcataccggtgatgatcggcccaccagcgcggatcgcgccagcgatagccgtcccagtagtggccgcgatgatcgcgatcgccgatatgcaacgacaggcccggcacgttcacgccgatggagacgtcggcctggctcgccagcggcagcgccagcagcgcagccagtaacaacagcgtttttttcatttcatggactcctgcagagcggacctcgtccgatcgcagataacatagtcccgcgctcgccgccgctctataggcgcaatgccgatttacgccttgcagacgcatccttcacaatttcaccacaatcgttcaccggcgattaacaataaatcgttgatatctttgatgtagatcacgtgttactcccggcatttcacgcgcttttaggcgtaaaaacggcaactcacgccgtataaaatgcatttcattccttctgccgtgcaattcattcccgatccgccgtccgccgggggggccggccatataataagcccagaccgcgggaacacagattcaccccgcaaatttcagccagcggctcacgcccggcaacgcacacacaggaaggagaccggccatgaacaccaaaccggcaaatcgcagcttaatcgttctcggcaccatcatctgtcagatgggtctgggcaccatctacacctggagcctgttcaaccagccgctggtcgacaagttccactggggactggcggacgtcgccaccaccttctccatcaccagcttcttcctggctttcgccacgctgttcgccggcaagctgcaagaacgcttcggcatccgcaacctgacgctgtgttccggcatcctggtcggcctgggcctgatcgccagcgcccatgtcagctcgctcgacatgatctacctgctggccggcgtggtggtgggctttgcggtcggtatcgcctacatctccaccctgtccaacctgattaaatggttcccggccaacaaaggcctgatttccggcatctccgtcggcgccttcggcagcggcagcctgctgttcaaatacgtcaacgccgccctgatcgccgacgtcggcgtttcaggcgccttcttctactggggtgccatcgtgatgggcctgatcgtcgtcggctccctgttgctgaaagagccggtgctggcaaccagcgccgcacagccaggcgccaacggtctgggcaacgacttcagcgtgcgccagatgctggccaccaaagaagcttacctgctgttcaccatcttcttcgccgcctgcatgagcggtctgtacctgattggcatcgtgaaagacatgggcgttcagctggccgggatggatttggccaccgccgccaacaccgtgtccgccgtcgccatcttcaacaccgccggccgcatcattctgggtacgctgtctgataaagtaggccgtatgcgcgtcatcagcttcaccatgctggttaccgtgctggcgattgtcgcgctgagtttcatgaccctgaaccacacgctgttcttcatctgcgttggcgcggtggccttctgcttcggcggcaatatcaccgtgttcccggcgattgtcggcgacttcttcggcctgaagaaccacagcaagaactacggcatcatctatcagggcttcggcctgggcgcgctggccggttcgttcgtcgccaaatacttcggcggcttccacgccaccttcatggtgattggcgtcctgtctgccacttctttgctgattacactgttcatcaaagcgccgaaagcggtggaaatggaaagcgaagaaaccgcacaggcggcggagctggccaaagcctgatcccctgcgaaaacgacaaggggcgcaacctgcgggttgcgccccttttttattgccccgccgcgcggcttacagccgcatgcccagcgtctggcgcagatgcgcgccggcccccaacaggcccggctggccatgggttatcatgaacaccggaatgtctcgcacatagtcacggaaacgccctttgtcttcgaaggcggcgcggaagcccgaggccttgaagaattccataaagcgcggcacgatgccgccggcgatgtacacaccgccgaaggtgcccagattcagcgccaggttgccaccgaagcgccccatgatcacgcaaaacagcgacagcgcgcggcggcagtcgatacagctgtcggccagcgcccgctcagtgatgtccttcggctccagtttctccggcaggcggttgtccgccttaacgatggcgcgatacagattgaccaggcccggcccggacagcacgcgctcggcggaaacgtgccccacttcaccgcgcagcacctccagaataatgtcttcttcttcgctgttcggcgcgaaatcaacatggccgccctcgcccggcaggctgacccagcggcgatcgacctgcaccaggtgggcaacacccagcccggtgccggcgccgtacaccgcgatcggtttgcccggctgcgcatcgccgccgccaaactgcagcacgtcgtccggcgagagcatcgggatcgccatcgagacggcggtgaaatcgttgatcacttccaggtgactcagccccaggctggccttcatttctttgatcgagaacgcccagctgtgattggtcatcgcgacccagtcttccgtcaccgggcaagcgatcgcgatgcaggcgtcctgcacctcgatctcgcactctttcaggtattggcggatcaccgcctccaggctgtcgaactccaggccggaataggttttcgcctgggtaatctcacccgtcgcaacagtgcacaacgccaggcgggcattggtgccgccaacatcacccacgagggcataggtcattgatttcgtctccgcaaaatgaaaaataaaacgctgcccacactgtaaaatcctgctgcgaaaacaacaatcacccgcctcggatctgcacctcaatagcgatccggatcacaaaaaacgtttcagcttgtccgctatgctgcgatttgaaacaaattgcggcaaaaaacgccccccggcgactgttaaccgtcatcgccgccgggcaatatcaatgcgtgcctgcgcgccgatagtctggcaagctgtggccactgcccaaccacccgcactccctgccccgcagggaggcatcgacaagggattattcatgctgcatccgcgcgccaatgccatgttggcctttgctttgcctgcgctgattatcggttccgtttccagtctggtgctgctgttggtgatgaaaattgccgccgcattgcagcaattactgtgggtgacgctgcccgatgcgctgagcctggacgcccagtcgccctggtggccggttgcgatgctgacgctgaccggcgtggcggtcggcctgatcgtgcgttatatgccgggtcacgccgggccggatccggcgacggaatcgctgatcggcatgccgctgccactctccgccttgccggggttggggttggcgctgattgtcggcctggccggcggcgtcagtctggggccggagaacccgatcaccgccatcaacatcgcactggtggcggcggccggcgcgcgcctgctgccgaaggtgccgcgcatggactggatcatcctggcggcggcaggcaccatcggcgcaatgttcggcacaccggtcgccgccgcgctgatcttctcgcaaaccctggccggcaataacgaaacgccgctgtgggatcggctgttcgccccgctggtggctgccgccgccggcgcggtcaccacgcagatgttcttcgtgcccaatttcgccctgcagctcgatgcctacgacgtgacgcggctgccggacattttcagcggcgccatcgtggcgctgatcgccatcgcgctcggcatggtggcgctgtggtgtttcccgcacgttcaccgcctgttccattcaatgaagaatccggtgttgatgttagggctgggcggctttgtgctggggctgctggcgctgttgggcggagagattaccctgttcaaggggctggatgagatgaaacgcctggcggtggacgacagctattcggtgccggcgctgttgaccattaccctgaccaagctggcggcgctggtgatcgccgccgcctgcggttttcgcggcgggcgcatcttcccggcggtgttcgtcggtgcggcgctgggcctgatgctgcaccagcatgttccggcggtgccggcggcgatcaccgtctcctgcgccatcatggggctggtgctggtagtgacgcgcgacggctggctgagcctgtttatggcggtggcggtggtgccggatctgcacctgctgccggtgttgtgcatcgtgatgctgcccgcctggctggcgctggcgggcaagccgctgatgctggtaaaccgccggcaaacgccgcgcgacgattaggccagcgcgaacgccgcggcggcgcgggcgtggattgcagtggtgtcgaacaccggcaccgacgcatcccgctcgctcaccagcaagcctatttcggtgcagccgaaaataatcccctgcgccccctgttgttccagatcgctgataatccggcgatactcgtcgcgcgaggcgtcgcgaattttaccgaggcacagctcgtcatagatgatgcggtgtacgatgtcgcgatcggcgctgaccggcgtcaccacgtcgatgccgtgcaattcctgcaggcggccgcggtaaaagttttgctccatggtaaagcgcgtgcccagcagcccaacgcggcaaatgtttttttcccgcacctgcagcgccgtggcatcggcgatgtgaatcagcggcagaccgctggcctgctcgaccgcctccgccaccttgtgcatggtgttggtgcagatcacgatagcttcggcgccggcggcgcgcaaagccaccgcggcggcggccaacagccggccggcgccgtcccaatcgccctggtgctgcaagcgctcaatctcctggaaatcgacgctgtagagcacgattttggccgaatgcagcccgccaaggcgcgcctttacctgctcgttgatggtgcggtaatacggaatggtggattcccagctcatgccgcccagcagacccaacactttcatccttcgttcctcagcatttccgacgatcctctgaccttacctgagaatcgtcggtctgacgacgccttatttggcgccggaattgatcggctggcgcgcctcgaaccagcgctgacgcagcatgtcgtacagccagttataggccatggtgtacggcaggaagaacaggaagaaaccgatttccagcataaacgcctgcgtccaggagatgctcagcatccaggcggcgatcggcacgccgatcaggataaaaccggcttcaaagccgacggcgtgcagcgcacgcaccttcaggttacgcaccacccggctgaccggccacaggcggtcgaacaccgtgttgtaaaccatgttccacagcatcgcgacggtggagagcattaccgccaacgcaccgacctgcaccattgaacggttcagcagccacgcgcccagcggggcgcaaaccatcacggcgatggcctcgaaaccgacggcgtggacgatacgttcaatgagagacttgttttgcagttgcatacatcaccttttttcaacagttgttgcgaaagccaggtgattatcatcgcttttttgggtagattaaaaatagattccatcgataaagtagatagatcatgcgctattccccggaagcgttgcacgcgtttgtcgaagccgccgccctcggctcgttttccgccgccgcgcgcaaactgcgcaaaagccaatccaccatcagcaccgccatcgccaatctggaagccgacctggcgctgaccctgttcgatcgcggcgcgcgccagccggtgctcaccgctgccggccgcaaagtgctgggacatgtgcaggcgatcctggccgccagcgaacgcctcgacgccctgagcattcagttggcgggcgaggttgaaccgcgcctgagcatggtgttttccgatacctaccagcccaagcatcacgatcggttgatgcaactgttcgaacagcgctacccggagattgagctggaatggatgatcgctgaggaaggcgacgtaatcgatctgctgcaaagcggccgcgcgcatttgggcatggtggaagtgcaaaaaagttatccgccggatatcgccttctcccggctgcctgagcagaccgaaatggggctgttcgtcgcccatcagcatccgctggcgcaggtcgctgcgccgacgccggagcaattgtccagcacccgccagttgatcctgaacacctacaccggcgccgaggcggccagacaaggcgggctggtctggtcggcacccagctatctgctgttgctcgagatggcggaacagggattcggttgggcggtgttgccgcactggctggtgcagcaatacggccacggcaggctcacccagctgcggccgcgcggctggcccaaactgatttcggtggatgcggtctggtccaaactgaccccgccgggcccggcggggttctggatgctggagcgcctgctgggcgacaccctgccttaagcggcggcgttgcgcgcctgaatggcgcgagagacggtatcgaggagttccggaatgtccatcttcggcagcatcacttcgatgaaagccagccggtcgccctgcgccgcctcactcagcgcctggcgcagcgcctccggctgactgacccgcaacgccttcaccggccgatcaccggccaacgccttcggcaactgcgtccagttccagcgcgcgatatcgttataacgttgctccggcccgtggatcgcgcgctcaacggtatacccctgattgttcaacacaaagatcaccggtttaagcccatctcgcagcatcgatcccagctcctgcacggtcaattgcgcggcgccgtcgccgatcaacagcaccacccggcgctgcggttcggcggtctgcacgccgaacgccgccggtaaggtatagccgatcgatccccagagcgcctgcacgatcatccggctgccgcgcggcaacgtcagcgccgccgcgccgaaacaggcggtaccctgatcggccagcacgatatcccccggccgcaggaaatcctgtacttgccgccagaaggcgtgctgatccagcccttccccatcgccttccggcagcgccgggcggacgatcggcggcaacggccaacgcgacgccagcgacaggctcaggcggtgcaatgcctgcaccgcctcgcgcatcggaatgcggctaaagcgctgccgcccgacccaggcttcgaacggttgaatatcgatgcatttttccaccggcaggtgatgcgtgaaccccgcggtaatggtgtcggtcaagcgtacgccgacgttgatcaccacatccgcgttttcgatcaattgtttcaccgccggatcgctggcgccgccgcagtaggtaccgacaaaaccggcgcgattctcgtccagctggcccttgccgagcaacagcgtcgcatgcggcatatcgacctcctgcagccactcgtccagcgccgcttcggcgccgaagcgatcggccaggaagtccgccagcagcgacacccgccgtgccgacagcagcttttcgcgcgccgcggcgataaacgcctgcaatgcgctctgcgacagtttggcctggcgcagcatcagcggcgccggtttactcggcagcggcgcctgcgcgacgtcgctgggcaacatcaggtaaaccgggcgatgctccagcaaggcggcgccgatcaggcggtctatctccagcgcagcgttgtcggcggtcaggtcggcctgcgcgacggtcacctctttggctatccgggcgaaatgagtgaagtcgccatcccccagcgaatgatgcagcaaatcaccggcgcgctgggcgcgctgcgccggcgtgccaaccacgtggatcaccggcaggtattcggcgtagctgccggccaccccgttcaacgcgctcagctcccccacgccgaaggtggtgagcagcgcggccgccggtttgcagcgcgcatagccgtcagccgcataggcggcgttcaactcgttggcgcagcctacccaggtgatttgcggatgcgcgaggacgtgatcgagaaattgcaggttgtaatcccccggcacgccgaagaaatgacggatgccgatttgggccagacgatcgagcagataatcggccaccgtataggtctgagtcatgatcatcacctgtctgcagctgaagcgattatcttaattatcgaagatgccgttcaaatttcgaacaatcatcccggcatcgaacggcaacctggcgttacatgccggcgtcgtgatcgctcccgcggcaacgcggtgtggaaacgtatacactcaaagcacttcacctttcgccgacaaggataactatgtcttacccagcctccccctcgcgttatcaagctatggaataccggcgctgtggccgcagcgggctgaagctgcccgccgtctcactcggcctgtggcacaacttcggcgacgccactttgtacgacaacgcccgtaccctgatccgctgcgccttcgatcgcggcattacccatttcgatctggccaataactacggcccgccgcccggcgccgccgaggagaactttggccgcattctcaacgccgatctgcgggcctggcgcgatgagctgatcgtctcctctaaagccggttacaccatgtggcccggcccctacggtgattggggctcgaaaaagtacctggtcgccagcctcgatcagagcctgaggcgcatggggttggagtatgtggatatcttttatcatcatcggccggatccggacacgccgctggaagaaaccatggcggcgctggatctgctggtgcaccagggcaaagcgctgtatgtcggcctgtccaactacccggccgagcgcgcgcgacaggccttcgacattctgcagcagctcggcacgccgtgcgtgatccaccaaccgaagtattcgatgttggaacgcgggccggagacggcgttgctggatacgctggaggaacatggcgtcggctctatcgccttctcgccgctggcgggcggcctgctgaccgatcgctacctgcacggcatcccgcaagattctcgcgccgccagcggcagccgcttcctgcagccggagcagctgaccgccgagcgactggacaaggtgcgccgcctcgatgcgctggcgcggcaacgcgggcagaagctgtcgcagatggcgctggcctgggtgctgcgcggcgatcgcgtgacctcagtgctgatcggcgccagcaagaatgcgcagatagaagacgcggtgggcatgctggccaatcgtcacttcagtgaagaagagctcgcgcagatcgagaacatcttattgtaatcgtttacaaattccgccgttcaatcgagcggcgatactccagaaaaatctcaaatcttaacttcctgcatcattttcagagtggctctcagattcaaccctatatgccggcgctatgatgccgatattgcagcaaaaataacgataaggccgcttttaaactgatgaacgcgcttcataaagtgacaaacggccaggccgcgcaagcgggaaggagaagccatgtttaaacctctgctcttggccgccattttggcggcgacggtactgcccgccgcacagcaggcgcatgccgaagggatcagcatcgatctgatgccgggcgtttcattgcgcatcggcgatcaggataaccgcggccgttactgggacggttacgattggcgggatcgcgactggtggcaaggccatcagggccgttatctcggcgaccgcagccgtcgcggttactactgggacggctatcgctggcgcgatggcgactactggcgtaagcactattactatcatgaaggacgctatcgtaaatacgacaaacactacgataagcaccactggaagaaagagaaaaagcaccatcacgatcatgaccgcgatcgctggcgccgccacggcgatgacgaccgcgattaaagacgacgggccggcgcaacgccggcccgcactgttttcgcttacagcacgctgccgatcagcaggtagccgttcaacccaaccaccaccagtacgatcagcttgcccagattttgcaccagcgggccgttgaccatttcccccatcagcgcccgattgccggtgaaagccagcagcggcaccagcgccagcgcaatgccgaagctgagcagcacctggctcagcaccagaatgcgcgtcgcatccatccccaacatgatgacgataaacgacggcagcatggtcaccgcgcgccgcagccacagcggaatatggaaacgcacgaacccctgcatcaccacctgccccgccagcgtgcccaccacggtagaagagaggccggcggccaccaggctcaggccgaacacggtggcggcggcgtgcccgagcagcggttgcagcgtcaggtaagccacgtcaagatcggcgatgccgctgtggccgctgaaatgaaacgcggcggcggcggtggccatcatcgccagattaacgaaaccggcgatggtcatagccacggcgacgtcgactttggtggcggcatagcgttccgccttgtcgtgctcgccgccgatttgggtgagcgacgaatgcagatagatcacgtgcggcatgatggtggcgcccaataccccggcagccaggaataccgcatcgccgttaggcaaatcgggcagcgccatccccttcagcagcggcgccaactgcggctgggagaaagccagctcgacgatgtaagcggcggcgacgaacaacaacagcccgccgatcaccagctccagcggcttttgcccgcgtttttgcagcatcagaattaaaaaggtggcgatgccggtcagcactgcgccctgcaacagagagacaccgagcagcagcttgaagccgatcgccgcgccgataaactcagccagatcggtcgccatggcgatgatctccgcctgtacccaataggcccacaccgccggccgcggaaagcgatcgcgaatatgctcggccagatttttcccggtggcgatgcccagcttggcggacaacagctggatcagcatcgccatcacgttggcccaaaccaccacccacagcaggctgtagccgaatgaggcgccggcctggatgttggtggcgaagttgccgggatcgatatagccgatagcggcgatgaaggcgggccccatgagcgagagtttaatttttctggcggagcgaccggaggtggtttcaaccacgcgactgttcagcatatgttgaacccttactgaaattacgtttatctccactctatataaatgataataattatcaagcgcatttagagcggtaaaacttatctctgtaatagccaacattaacggttttatcgaagggttcagcgcggagcttgccgatttccgtgcttttctgatgggattttggctgcaatacccctgaaagacaggttagcacaagaatacgaatttcctattgctgctttaacatcttgattttttatgcttttgcgcaacactttaggagaactcccactatgattttccatatttgcaatagaagtctcgtttttaaacgtagcgttacataaaatgacagccgaaattcagcctgcctcaaatttggagcaaacatgtcccatattgcgcactttgcgttggcgatagtggtggtagcgatcctggccctgttggtgtgccgcgatcgtaaaagcatccgcattcgctatgttattcaactactggttatcgaagtactgctggcctactttttcctgcattcggaagcgggtttgggcttcgtaaaaggattcgccgcgctgtttgacaaactgctcgggtttgcgggacaagggactgatttcgtgttcggcggcatgggcgacaaaggcctggcgttcttcttcctgaaggtgctgtgcccgatcgtcttcatttcggcgctgatcggtattctgcagtacatcaaggtgctgccgttcatcatccgcattatcggcaccgtgctgtcgaaagtgaacggcatgggcaagctggagtcgtttaacgccgtcagctcgctgatcctggggcaatccgaaaacttcatcgcctacaaggatatcctgggcaagatgtcggaaaagcgcatgtacaccatggcggcgaccgcgatgtctacggtttccatgtccatcgtcggcgcctacatgaccatgctggacgccaaattcgtggtggcggcgctggtattgaacatgttcagcacctttatcgtgctgtcgctggtcaacccgtacgacaccaataaagaagaagagctgcacctcggcaacctgcacgaaggccagagcttctttgaaatgctgggtgaatacatcctggcgggcttcaaagtagcgattatcgtcgccgcgatgctgattggcttcatcgccctgatcgccgcgctcaacggtgtgttcagcgccattttcggcctgagcttccaggaaatcctcggttacttcttctatccgttcgcctggatcatgggcattcctaagcacgaagccctgcaggttggcagcatcatggccaccaagctggtttccaacgaattcgtggccatgatggaactgcagaaagtctctgccgagctgtcgccgcgcagcctggggatcctgtcggtgttcctggtgtccttcgccaacttctcttccatcggcatcgtggccggtgcgatcaagggcctgaacgaacaccagggcaacgtggtgtcacgctttggcctgaagctggtgtacggctctacgctggtcagcatcctgtccgcttctatcgcgggtctggtgctgggctaagcctgaaattcacagcaatgataaggcgcctgcgggcgccttttttattggccggcattcggcgaaggttaaatgacacaaagcaaaaagccgaccctaaggtcggctttttaaatggtggtggagctagacgggatcgaaccgtcgacctcttgcatgccatgcaagcgctctcccagctgagctatagccccacaaaagtggtacgctttgaccggcgttacggtatccccaacctttctgagaagaagattggtggagctagacgggatcgaaccgtcgacctcttgcatgccatgcaagcgctctcccagctgagctatagccccgttccacaatcactttgtgctgtgaacggggcgcataatatgaaacccgctcaaagctgtcaacggctaaattgaattactgaatcaagcgttgaaaaagccgccaaatcagcatctttggcgccaaaaaatcatcactttgcgcagagttcatccattttgcgcgctacatctcaaaatggcgaaagaccctgcatatcacgttgatttttaattaacggaatgttagcgaaatgcgcttgagtcggactcccgagcggcatagactgcccgcgccataaacttcattactataaaccgagtccgtcatgtctttgcattcaccaaaagaaatcgccgccctcgccgttcaggccggggtaaacaaaagccgcgccccgctcgctaatctgctgattctgggctttctcgccggcgcctttatcgccaccggcttcctgctggatattcacgtcatcggcaccctgccggccgaatggggctctttcggcgcgctgttgggcgcagcggtgttcccgatcggcctgatcctgaccattctggccggcggcgaactactgaccggcaacatgatgaccttgccaatggcctggttcgcccgtgaaattcccgccatcgccgtgctgcgcaactggttttgggtcaccctggccaacttcgccggcagcgtggccgtcgcctacttcttcggccacctgctgggcctgaccgaaggcgcgtttttacataagacgctggcgatcgcgcaggccaaagtggatgcggacttcctgcacgccttcatctccggcgtcggctgcaactggctggtatgcctggcggtgtggttagccttcgccagcaaagatgtgccgggcaaagtgatcggcatgtggttcccggtcatggcttttgtcgccatcggcttccaacacgtggtggcgaatatgttcatcatcccggcggccatctttgccggcggcatgggctgggagcagtatctgcctaatttcgtcgcggtatttctcggcaatgcgctgggcggcgccggctttgtcgggctgatgtatttcctcgcctatcgccccggtttgccggccagcgaacacgcctgacaaccgccatgaaaaaagccccgagattgctcctcggggctttttctttatggacagcgtatcagcctaatcaggcctgcgcttcacgctcggcgatataagccagcgccatatcgatgcgctgcagcgaacgcttctggccgatcgcatgcacggtcacgtccatgcccggcgactgaccggcgccggtcaccgccacgcgcagcggcatgccaaccttgcccatgccgacgcccagctcgtccgccgtaccctgaatggcatcatgcacattttccggcgtccagacggtgatggcggccagcttggcgcgcaccgcttccagcggctgacgtgcaaccgggcgcaggtgtttcttggcggcgtcggcgtcgaactcgctgaagtcttcgtagaagtaacggcaagactccgccatttcctttagcgtcttgcaacgctcgcccagcagcttgacgatgtccttcagttccggaccgttgcgggtttcaagacccagttgctcaacgtgccacgccagatgcaccgccacttcttccgccggcatatggttgatgtagtgatggttcagccactgcagcttctcggtgttgaacgcgctggcggatttgttgatcgcttccagcgtgaagaactctttcatctcgtcgatggagaagatctcctgatcgccatgggaccagcccagacgcaccaggtagttcagcagcgcctgcggcagatagccgtcgtcgcggtactgcatcacgcccacggcgccgtgacgtttggacagctttttaccgtcgtcgccgaggatcatcgacacgtgcgcgtattccggcaccggcgcgcccagcgctttcagaatgttgatctggcgcggggtgttgttgatgtggtcttcaccgcggatcacatgggtgatttccatgtcccagtcatcgacaacgacgcagaagttataggttggcgaaccgtcggtgcggcggatgatcagatcgtccagctcctggttgctgaattcgatcgggccacgaattttatcgtcgaagatcaccgacccttcctgcgggttgcggaagcgcaccacgtgcggttcgtcgtcggtgtggctgcactggctgtcgcggcagtggccgtcgtaacgcggcttttcgccattttccatctgcttctcgcgcagcgcttccagacgttccttggagcaatagcatttataggccgtgccctgctccagcatctcatcgatgaccgcgttgtagcgatcgaaacgcttggtctggaaatacgggccttcatcccaatccaggttcaaccagttcatgccatccataattgcgtcgatcgcgtcctgggtagaacgttccagatcggtatcttcgatacgcagaacgaactcaccgcccgcatggcggctgaacaaccaggaataaagtgcggtacgcgcgccgccgacgtgaagatagccggtcgggctcggtgcaaaacgggttttgattttcattgggttcactgccttattacgcaacgcgtgtcggcggttgccgacgattgctcggaattgaaaaaagagtggacgacattgtatcaccacgcgctaattcctcaacgccgacacgatattgcaccggtcgatttcgcgcgttttgcggcgagtttcgcatagcatcgcgcaaagaatcggcgctgctggcgattattatcgcgccctgcctaaatttgcggcgaacgattgaaatcattttaaaaaccgttgactcactttgaactatccctataatgcgactccaacaagacggggcgattagctcagttggtagagcatctcctttacacggagggggtcggcggttcgagcccgtcatcgcccaccatcttgttgagaaaaatgagaacgaatgagggtgattagctcagttggtagagcatctcctttacacggagggggtcggcggttcgagcccgtcatcacccaccatcattctctcgtttagcagtaacctggaagtcctgaagtgggtgattagctcagttggtagagcatctcctttacacggagggggtcggcggttcgagcccgtcatcgcccaccatcttgttgagaaaaatgagaacgaatgagggtgattagctcagttggtagagcatctcctttacacggagggggtcggcggttcgagcccgtcatcacccaccactgttatgggtcgttagctcagttggtagagcagttgacttttaatcaattggtcgcaggttcgaatcctgcacgacccaccaattcagaaaaaagcgccttttggcgcttttttcgtttctgcgccacctgctcccgacttcatcttctcgcaggcatagtttaccgagtcgtgcaggatgaagaaccgtagaggttcgagcatcgcgcagcgatacgacaacgcgcagcgttgcccgcagggtgaggccacaggccgaatcaatcctgcacgacccaccaattcagaaaaaagcgccttttggcgcttttttcgtttctgccgttcgcctccctttcttcttattcaccacgcgctgagatacgaatggttatcattttggcggcttgaatggtaaattagccggcatccaccacacagccaatcctcagccggattgatacaccttagttcaaggaaagaaagagcccgctcatgaccctatccttacgccagctgttcattgcatttatcgccacttccagcctgttgctcagcggctgcggcccggacgacaagagcgacggacagaaaccgtccgcccccgcagccgacggcagttggccgcgcaccatcgacagcgtcaaagggaaattcacgctggaaaaaccgccgcagcgcatcgtgtccaccagcgtcaccatcaccggcacgctgttggctatcgacgccccggtggtcgccagcgccgccaccagtccaaatccgctggtggccgataaacaaggtttctttacccagtggagcgaggtggccaaacagcgccacgtcgagcggctgtaccaggtggagcccaatgccgaggccgtcgccgccgccgcgccggatttgatcgtcgtcgccgcgaccggcggtgattcggcgttgaaactttatgaccagctgtccgccattgcgccgactctggtgctcgactatggcgacaaaagctggcaacagctggccagcgagctcggcgagatcaccggtcatgaagccggcgccaaacaggcggaagatcgtttcgagcagcgcgtggagcaagtgaaacaggcgatcgcgctgccgccgcagcccaccactccgctggtgtatgccgacaacggccgcgaggccatgctgtggacgccgggttctgcccagggcaaactgctgacccagctcggcttccaactggccaccccgccggaaagcgccaaaggcaacaccagcatgggtaaacgccatgacatcatccagatctccggcgaaaaaatggccgaaggtctgaatggcaaaaccctgatcctgttcgccaccaatgagcgcaaagtgcaagaggtgctgaccaacccgttcctcaaacatctggagccggtggaacagcggcacgtctacgccgtcggcaacgacaccttccgcctcgattactacagcgccaccaacatgctgaatcaaatcgaacggttgttcaaaaagccctgaatcacgccgtcggcaggtcagccccctgccgacactttccgcaagcggggcgaacgttcacattcaatcaattgaaatatcaatagttattaacattgtccacgcacctttgccaccaaccggcgggtgcatgcgggcgtaaactcgtgctactattgccccgcatgaacgcaaataacaatgagaataaaaatcatacaggagttaccggtgtgaacgtacccactccgactgagcggacgctttcgtccgcaccgcacgcagcttacgccagtggcttcaaacgcatcgccgggttcggtatcggtttggcgctgttgctgctgtgcatcatggccagcctgatgctgggttccaaagccatccccttccataccgtctggctcagcctgcagggcgccgcgagcggttccgacagcaccatcattctcaatgcccgggtgccccgtacgctggcgggcatcctggccggcatggcgctcggcgccgccggcgcgctgattcaggcgctgacgcgcaacccgctggccgatcccggcgtgctcggcatcaacgccggcgccagcttcgccgtggtcatcggcatcatgtttttcggcgccgccaccaccgaaagctacatggcctacgcctttgccggcgctgccctcaccaccctgctggtctacctgatcggcacgctagcgggcgggcgcatcaacccggtgcggctgacgctggccggcgtggcgatcggcgcggtgctgctcggcatcaccaccgggctgtcgctgatcgatccgcaaaccttcgaccaactgcgcttctggcaggccggcacgctggatatccgcacgctgtccacgctgccggtcaccgcccccgccattttgctcggctgcctgctgacgctgctcatcgcccggccgctgaataccatcggcatgggggaagatctggctatcgcactcggcgcgcgcgtggtgctgactcaggtgatcgcggtgatcgccatcacgctgctgtgcggcgcggcgaccgccaccgtcggcccgatcagtttcatcggcctgatggtgccgcatatcgcccgctggtgggtcggccccgaccaacgctggatcctgccctactccatgctgctggcgccgattttactgctgtgcgccgacgtggtcggccgcttgctggcggccggtgaactgcgggtttccatcgtggcggccttcatcggcgcgccggtgctgatctggctggtgcgccgcaagaaaacgctggggggtctgtgatgagtctgccgcatacgctgcatatcggccgcccggacggcgtcatcaacgggcgcctgccgctgcgcctgctgctggtcaacctttcactgttggcgctgtgtctggcgatggccgtcgccgccctgtgctacggcacgctgcaactttcgctggagcaggtttttgccgcgctgaccggcgaggcgccgaaaaacctggtcaccgtggtcacccaatggcgcttgccgcgcatcgccatggcgctgctgttaggcgccgcgctcggcatgagcggcgccatcttccagtcgattatccgcaacccgctcggcagcccggacgtgatcggctttaacatgggggcttacaccggcgcgctgatcgccatcaccctgttcaacggcggctactattacatcgccggcggcgcgctggccggcggcattctcgccgcgctggccatctatctgctggcctggcggcaaggcatcgccggcttccggttgatcatcgtcggcatcgccataagcgcggtgctggtctccaccaacacctggctgatcatcaccgcctcgctcgagcgcgccatggacgccgccatgtggcaggccggttcgctcaacggcatgacctggcaaaaagcccagcccgccacggcgttcatcgtgctggcggccgcggccgcgctgctgatgggcaaacggctgcagctgctggaaatgggcgatgacacggcgcgcgcgctgggcgttaacgccgaaggcagccggctgtggctgatgctgttcggcgttaccctcaccgccgccgtcaccgccaccgccgggccgatttcctttatcgcgctggcggcgccgcagatcgcccgtcgcctcgccggccaatcctcggtcaccctgacctcctcggcgctgatgggcgcggcgttgctgctcggcgccgacgtggtgtcccaacatcttttcgcgccgatccaactgccggtcggggttgtgaccgtctgcatcggcggcctgtacctgatttggctgctcatccgagaggcccgcagataatgaagagtgataatgccatgagccaccgcctgcacgcctcgcacctgaagctgggctacgacaataaaatcatcgctgacgatctgagcgtggcgatccccgacggcgccttcacggtgatcgtcgggccgaacgcctgcggcaaatcgacgctgttgcgcgccctgtgccgcctgctgaaacccagcgccggcgaggtgatgctggacggcaagaacatcagcagcttcgccaccaaggcgctggcgcgcgagcttgggctgctgccgcaaacctcgatcgcgccggacagcatcaccgtggcggacctggtgtcgcgcggccgctatccgcaccagagcctgctgaaacagtggacgcaggccgacaaacaggcagtggaagccgccatggcggccaccaacgtcagccagctggcggatcgcagcgtcgacgagctgtccggcgggcagcgtcagcgcgtctgggtggcgatggcgctggcgcagcaaaccccgctgctgctgctggatgagccgaccacctatctggacatcgcgcaccagatcgagctgctggatctgttccgccagctcaaccgcgagcgcggtcaaaccctgatcgcggtgctgcacgatctcaaccacgcctgccgctatgccgaccacatcatcgccatgcgcgacggcaagatcgtggcggaagggaaaccggcggagatcattaccgccgaactggtggagcgggtgttcggcatgccgtgcatgatcatcgacgatccgctgtcccacacgccgctggtgatcccgcgcggccgctaccactgcgacgcgccgcaggcatgaaaaaggccgggttaccccggcctcttggttatttctccagcgacacctgtttgaagatgtgtttgccgaacgggtctatctcgtagcctttcacttccttgcgcaccggttcgaagatggtcgagtgcgcgatcatcagcgccggcatctgatcgtgcatcaccacctgcgcctgctgatacatcgccacccgtttggcgtgatcgttctcctcgcgcgcctgcaggatcaactggtcgaacggtttgtagcaccatttcgccgagttggagccgccgagcgaagcgcaggtgaacagcgggccgaagaagttgtcaggatcgccgttggcggtggtccagcccatcagcgcggtctggtgttcgccgtttttaatccgctgtaaatactcgccccactcgaaggtgacgattttggcgcgcacgccgattttggcccagtcggcctggatcatctccgccatgcgcttggcgttggggttatagggccgctgcaccggcatcgcccacagatcgatatcgaacccctgccccaacccggcctcctgcaacagctgcttcgcccgctccggcgaatacggataatcttcaagctgcgcgttgctgccccattgggtcggcggcagcagattcttggccggctggccggcaccgtggaacaccgcgtcgatgatcgccggcttgttgaccgccagcgccaacgcctggcgcaccttgacgttatccaacggcttcttctgggtgttgaacgccaggaagccgatattcaggccggatttttccatcacctgcaggttgccgtcctgccgcatgcgcgccagatccgccgggttggggaacggcatcacctggcactcgttcttttgcagtttggcgtaacgcaccgtcgcatccggcgtgatcgagaacaccagccgatcgatcttcggtttgccttcccagtagcggtcgaacgccttgtagagaatttttgcgtccttctggtactgcaccagctggaacggcccggtgccgatcggatcgttgtccacccgctgcggcgtgccggccttcagcatcgcgtcggcatattccgccgataaaatggtggcaaaatacatgcccagatcggcaacgaacggcgcctcggcgcgggagagctcaaagcgcacggtgtggtcatccaccttgacgatccggtcaatcagcgtgccgaactccatcgactcgaagttggtgtaggcaccgttggagaccttgtgatacgggttgttggcgtccttctggcgcataaacgagaagatgacgtcatccgcgttgaaatcgcgggtgggggtaaaatatttattgctctggaatgccacgcccttgcgcaggtggaaggtatagcgcttgccgtcttcgctgacctcccagctttccgccaggctgggttgcagctcgacggtgccgggtttgaaatccaccagccggttgtagatcgccgccgagctggcatccaccgtggtgccggaggtgaacagctgcgggttgaagccttccggcgagccttcagaacagtagaccagcgtattggcccgcgcgccgccggcaatcgccaacgccagcagcccgatcgttattgcttttcttttcattgcgctatccccagtggtgaaaaaacaacccaacggatagcaataaatcatgcagttagcgatgtaaaggacaaattccgcgcataaaaacgggcaggcgcgcaagccgcctgccctggtgaaaccacgcgatgatgaaattaaatcatctggctgaagttcatctgcgccatcagcttatagttgtcggcgtagtcgaccggaatggccaccaccaccggcccctggatcgccatcgccttgcgcagcatcggccgcagatcgtccaccgactgcacggcgaaaccgaccgcgccgcaggattccgcataggccttgaagtcaatcggcccgaactccacgccggatttgcgctggtatttgttcacttcctgcatctccaccatgttgtaggcgttatcgacccagatcacgtgcacgatgttgtttttcagccgcaccgcggtctccagctccatgctcgactgcatgaagccgccgtcgccggagatcgacaccaccttgtcgccggggcgcaccaacgccgcgccgatggcccacggcagcgccacccccatggtttgctggccgttggagatcaacagctggcgggcgcggaagctgtaaagatagcgggcgatccagatgtggaaactgcccatgtccacgcacagcgtcacgtcgtcgctgacgatgtcctgcagctccttgacgatgcgcagcgggtggatcggcatgccgccgcggcgcgcggcgcgctccgccagttctgtgcgctggcggccgagatcggtgaggatcagctccacctccggcggcacgcagaccgcctcattgaacgtttcggtcatcatgttcaacgtggcgctgatgttgcccaccagttcgacgtccggccgatagcaggtgtcgatatccgccggcagcacgtcgatgtgcaccagtttcagccgcccatgactgttccacatgcagggatcgtattcgatcggatcatagccgacgctcaccaccagatcggccttctgcaacagctgatcggccggctgattgttgaacaggccaacgcggccggcgaaacgggcgaagtggttgacgtcaatcacccccgccgcctgataggtgccgaccaccggcatgtgggtgcggtacagcagatggcgcaccgcctcgctgttctccggccggctggcctgcaaaccgagcagcaataccgggcatttggcctggcggatcagcttcaccgccgcctggatgtcgtccgccgccgcggcccccatgcgcggcaagcggcagccggccaacaccggcgcgctgaccggttcattgacgatatccatcggcaggctgacgaacgaggctcccgggcggccgaactcggcgcggcggaaggcgttggcgatcacctcggaaatcgccgaaccggcgtgcacttcggcgcaatacttggtcaccggccggaacatgctgacggtatccatgctctggtgtgtctgcttcaggctgtcggcgcgcttcaccgccccgccaaaggccactaccgcgtccccctccgaggtggcggtggccagcccggtgatcaggttggagctgcccggcccggaggtgaccagcgccacccccgccttgccggtcaagcggccgaccgccgccgccataaaggccgcgttggcctcatgccgcaccaccaccgtttcaatcgatggcgcgtcctccagcgagtcgaacacccggtcgatcttggcgcccggaatgccgaaaacgtgtttgacgccctgtgcttccagatttttcaccaccaaatcggcgccgcattgccagtcattgcctgttttttcctgtgccatggttccacctcctaagaaaacgatcgccggggttagccctcggcggaacgaatcgcgcgatccaaatcctctgggcagaggttggcgcgcaagaaatccgcatcatgcggcaactgaagattgagacgggtgatgacgccgaactgcaggcggccgtgatcgagctggtagtccagcacgtggccgccgccgctgcggtcgtcggtaacgaagtgttcgtgatagccggccacgccgatgccctgcatgtaatccggcgagcggaagccgaccagcgtgccgcgccgttgatgaaacgagaaggtcggctgctcttctatcgcttccagcatcgggcgatagggccgttcctgacgcggcacggtgcgggtttccacgtggctgaactcaccgtcgacccgcaccgcgcaaaacaggttcggcgaggcgacctgttcatcgatgcattggtgcagctgcgccttggtgatcggccggtcgaactgctggctgatactgggctggaaaaaggtgacgacggcgaaaggggttttctgttgcaaaccggctgggcgggcgctgccgtcggcgcgtagctggtgtatttcctggtcgaaagcgatcagttcgccatccaggtgattgaaggtgccgaggccgaaatcaccgtgtttgagcaactcggcaatggtggtttcaccctcgtagaccccgtcgatgagcgcgctcatcagcgagatttgatagatttcgccctccccggcgttgatcgactgcctggcaaaaccctgcgccaaatggcgcgcacaggaacacccgtgtttttcgttcatgactcactcctccaccagcgcgggatcgcgattccgcgcgttcaaaagacccaccgacggtgggccaagatgccccccaaggcgcgttcatcagttggaacgattcagcctgaggcgacaaaaaaaccggcacggctggccggccgatatccagaacccacggcatgacgtgtgaaagtaaaggctcactaatcattaatgccgagtcggatatcaaattgaacggttaatctggtgttggagcgacaatcaactccgcaggcggctcatgcagcctgggaaaaacatctgttatttagtgctaagcgccgcgaggtttatgcgttttctctctatacggccgggatgcagcggcgttgaagcccgccgtcaacccgcagccagagtagccgcagcaccgtcgacagagaagcgggtattcataagaaacgcttttgcatataatgcaaaaatgaatgacgcccgttatgttgaacatctgccgatctttctcgacgtggcccgcttgggcagcttttccgccgccgctcgccggctgggcatggtgccctcctcgctggtgcgccatatcgacgccttggaaagcgcgctcggcgccacgctgttcgtccgctccacccgtgggctgctgctgaccgacgccggcgagctgctgctgacgcgcgccgccgcgctgatgacggacattaccggcattcacgccgagctgaacgcgctgaacgaaacgccgcagggcacgctacgcatcagctgcctgccgaccttcggcaaaacctatgtgctgccgctgctgccgacgctggcggaacgctatccgcagctgtctatcgatctcgatctgaccgaacgccagaccgatccgacgcaggaacggctggatgccgccctccgcatcggcgaacagaaggacagcgcgctgtacgccagccgtatcgccacccaacgctgggtgatgtgcgccagccccgcctacgtcgcccgctatggcctgccgagcgatctggaagcgttgccgcagcatcggctgatcgcccgctaccacaaacagcagccggcctgctgggcgcagatcctcgacgcggcgctgatgagccgctgcaccatggcgctgcgctgcgacgacttcaccgcgcagcgccaggcggcgctgctcggcctgggcatcgccttcctgcccaactgggtggtgggaccggacgtgcagaatgggcaactggttcagatgctcgaagatccgcgccatgagcagcaaggcatctatctgctgcgcccgatggcgaaggtgtccgcccggctggcggccttcaccgccctgctgcagcaaaccctcggtcagccgcccagctgtgggtaaagcggagtgacgcggccgcgcagcgccggattgtcgctctcgtccttcagctcgatgccgctcagccgccgccggcacgcctgttccagcagccaggccaatttgaacgccgcctgcggataatccagcccctccggccgcacattggagatgcagttgcgctctgagtcccttctgcgcgcgttcggctcccaggtcagataaacccccaggctgtccggcgacgacagccccggccgttcgccgatcagcaccgccaccgcccgggcctgcaggcattcgccaatctcatcccccagcgccactcgcgcctgatgcgccaacaccaccggcgcgatcgccagccccaatgtatcgagatagggccgcagcgcctgcagcagcggcaatgcctggcggtgcaccgccttggaagaaaggccatccgccaccaccagcagcagatcggtccggcgcggcggcacgccgagcagcaggcggcggctgtccggcgccaatcgccgccccagatccggacggcgcagataggcggcgcggtcggcggcctggctgtgcaccgccagcgtgggccaaccggcatcgtgcagatccgccgccagccgttcgctgtcgaaaggctgatgcaccgcgtcgcgcgcctgggcatgggccaggccgaagcgcagcagctcgtcggtcggcaggctggcgccggtgcgccccaacgcgatgcgcgcgtcggtaaaggcgcgcagcgagtcccaactgttgacgtgaaccggtttgctcatgtccgttctccctgcagcgccagcaacagcgggtgattggcggcggcgtcgcgcagccgcccgcgctcgtcggtgatgttcatcgccgccagccaggcggcgaactccggcgcgtgcttcagccccagcagttcgcggatatagagcgcgtcgtggaacgaggtgctttggtagttgagcatgatgtcgtccgcgcccggcacgccgatcaggaacgtcagcccggcggcggccaacagcgtcagcagcgtgtccatgtcgtcctgatcggcttcggcatggttggtgtagcagacgtcgcagcccagcggcaggccgagcagcttgccgcagaaatgatcctccagcccggcgcggataatttgtttgccgtcatacaggtattcggggccgataaaccccaccacggtattgatcagcagcggcgagaaatggcgcgccaccgcataggcgcgcgcctcacaggtctgctgatcgacgccgtgatgcgcgttggcggacaggcaactgccctgcccggtttcgaaatacatcacgttatcgcccagcgtgccgcgcctgaggctcagcgccgcctgctgcgcttccgccagcagcgccagactgatgccgaaaccgcgattggccgcttcggtaccggcgatcgactgaaacaccagatccaccggcgtgccgcgctccatcagccgcagcgtgttggtcacgtgggtcagcacgcaggattgggtgggtatggcgaagcgctggatcacgtcgtccagcatgtagttgagcttttccagcagcggcaggctgtcgctggccgggttgatgccgaccaccgcgtcgccgctgccgtacagcagaccgtccagcatgctggcggcgatgccctgcaggctgtcggtcgggtgattgggctgcagccgcacgctgaggtggcccggcaggccgatggtattgcgaaagcgcgtcaccacccggcatttcttcgccaccaggatcagatcctgattgcgcatgatcttgcttaccgctgccgccatctccggcgtaatgccggcggccacctgcgccagcatggcgctgtccgcctgctcgctcagcagccagtcgcgaaaatcgccgaccgtgaggtgcgagatgggctcaaaggcggcggcgtcgtggctgtcgataatcaggcgcgtcacctcgtcctgttcgtacggcaccagcacctgctgcaggaacgccttgagcggcacatccgccagcgcgatgcgcgccgccatgcgctcttcggcgctctccgccgccacctccgccagataatcgccggaacgcgccggcgatgctttcgccatcagctggcgcagatcgccaaagcgatagccgcgttggcccaccgttgcctgaaacatagccccctcccttgccctgcgtgacgagataaaagccctgcaccaagtgtagtcagtgggaaaagaaaattattttgcacgcgatcgccgccatcacgctttcccccatttcacccgttgccgcttcgggttacagtagccgcgaaaacaggaggggtgatggatccgcaacggcaaattatcgactggctgcaacaagataacgcacgcatggccgccctgcgcaccgtgcgccggctcggcttgaatgactggtgcctcggcgccggctttgtgcgcaatctggtgtgggatcggcgccatggctatacggagcccacgccgctcaacgatatcgacgtgatccacttcgatgcggagcgtgcggacgctgagcgcgatcgcatgctggaggtgcgtttgcaacagtggctgccgcgaccttggtcggtcaagaaccaggcgcgcatgcacctgcgcggcggccgggcgccttatcgcgacagcgaagaggccatcagcttctggaccgaagtggaaacggcgatcggcgcgcgcctgaacgccgacgacagcatcacgctggtggcccccttcgggctcgcggcgctgttcgacgacaccattacctttaacgcgaaaaacggcgatcgcgcggcctatgcccagcgcgtgctcgacaaaggctggctgcagcgttggccgcgcctgcggcaggtaaagatttagccgccgctgccgataccctgaacagcgatataccgactcagggagagcattcatgtcgaccaccatcaccatgatcgtaccgatcaaaaataccgttcccggcgtcagcaacgtgttcagcgcgccgggccatcagggcgaattgctgatggccaaaccggtcaacaaccagccgcaaggcggcaagatggagaaaaacgaacgcgccaacggcaatgacgaaccggtcaacctcaatgaaagccgcgcctcggcccgcatcaaggcgctgaaccggcagattcagtcgctgcagcaaaagttggtggagctaaaggactccgacgccgatcctaaggaaatcgaaaaacagaagcagctgatcgaagcgcagatcaagatgttgcaagccgagatcgcgcgcatccagaaagaagaaatggaaaagcaacagcaggagcagatggcaaaagccgcggcgcaagctggcgacggcgtaaaccgcccaacgccgctcaacgccgtggacgtctatatctgagtcaatatgccgcgttttcccgccggcgctggtgcagcagcgccgcctgctgacgcgccacctgccagatggcctccgccgccggcgtcagtgagcggttcttacgccgcaccagcatcagcgcgcggttaatttccggcaccagccgccgcacccggagccgacctccttccggcaacggcagcgccaacgccgggaaaatgctgatgccaatcccctccgccaccatcgggaacaacgtggccggatggccgatttcctgcaccacctgcgcctccacgccctgctgcctcagcgcactgtcgatcagcggccggctgcccgacgcatagtcctgcaacaccaggcggcagccgtttagcgccgaccaacgcacctcttgctgctcagcaaacgggtgatcgtcgcggcacagcagcagaaacggttcatgcagcaccgcttcgcactccagatccaccgcctgcaccggatcgaccacgataccgaaatccacctcggcgttacgcacgctgtgcagcacctgctgctgcgcctgatcgcgcagcatgatgcggatctccgggtattcacgctcgccggcggcgatgcactgcggcatcagatgggcggaaatggtttggctcgtcgccacccgcaccgtgccgctgcgctgtacgccaaagctgcgcacatccagcagagtggtctgcagctcgtccagcaaccgttcgacccggttggccagccgcaggccggcatcggtcaacaccacttcacgcgtggtgcgatccagcaggcgcacgccgacctccgcttccaactctttcacgctgtggctgaccgccgattgcgtcaggccgatcgcctcaccggcgcggctgaagctgccgtggcgggcgatggcgacgaacacccgcagctgtttgagtgagtaattcatgtgttttattcatatatgaattaaataaatcaatttaattattatatgtccgcgcgggagaatagccctatcgattttcgaccctgagcgcaccgccatgagatttctgcccgatcgttttaccctgacgctgatcgctaccgtgctgctggcgtcgttcctgccggcgcgcggcgagttcgtcggctggctcaacgccctgaccatcgccgccatcgccctgctgttcttcatgcacggcgccaagctgtcgcgcgaggccatcctggccggcagcaacaactggcggctgcatctgtgggtgatgttcagcaccttcatcatttttccggcgctgggcatgctgttcgcctggtgggcgccgatcgacgtcagccccgagctgtatgccggtttcatctacctgtgtatcctgccggccaccgtgcagtcggccatcgccttcacctcgctggcgggcggcaacgtggcggcggcggtgtgcagcgcctccgcttccagcctgctggggatcttcgtgtcgccgctgctggtcggcctgctgatgaatgtgcacggcgataccggcagcctgcggcaggtgggctcgatcgtgctgcagctgctggtgccgttcgtcgccggccacctgctgcggccgctgatcggcggctggatcgaacgccatcggccgcttatcggtaaaaccgatcagacctcgattctgctggtggtgtacgccgccttcagcgaggcggtgacgcacggcatctggcatcaggtagggatgggctcactggcgtttatcgtcggcggcagcatcgtgctgctggctatcgtgctggtggtaaacacttacatggcgcgctggctggggttcagcaaagcggacgagatcaccatcgtattctgcggttcgaagaagagcctggcgaacggcattccgatggccaatatcctgttcccgacggcgacggtggggatcatggtactgccgctgatggtgttccatcaggtgcagttgatgacctgtgcagtgctggccaaaaggtatcagcgcaagcagcgggcacaacaggcagtgcccaacgccaacgcgcaggcgtcgcgcgggtaaaaaaaaagacgggccgaggcccgtcagttcagcttttcttcaacggcttgaccaggtggtcaagcccttcgattttaatcgccagcgtcatctccatcagcatgccgagcttgcctttggggaattcacccttgcgggcgaaccacagcaggtactcttcgggcagatcgatcagcacccgcccctggtacttgccgaacggcatcacggtattggcgatctccagcaggttttctttttccatcactcacccagcaggcggatcatctccgcttcgtcgatcacggcgatacccagctcctgcgccttcgccagcttggagccggccgcctcgccggcgatcaccagatcggttttcttcgacacgctgccgctgaccttggcgcccagcgccgtcaggcgatctttggcctcgtcgcgcgacagctggctcagcgagccggtcagcaccacggttttgccggcgaacgggctgtctatctcttccgccaccaccaccaccggcgccggccagtggatgccgatctcggcccccaccagctcgttgatcacctgctgattgagcgcttcatcgaggaagttgcgcgtgtgtttggccaccacttcgccgacatccggcacctctttcagcgcctcaatgtcggcggcgaacagcttctcgagcgatccgaaatgcgcggccaggttggcggcggtcgcttcgccgacctcgcgaatgccgagcgcatacaggaaacgagcgaaggtggtctgcttggatttctccaacgcgttgaccagattctgcgccgatttcggccccatgcgatccaggccggtcagaatgccggcggacagccggaacagatcggccgggttcttcacgtactccttgtccaccagctgctcgatgatcttgtcgcccatgccttcaacgtccagcgcgcggcgggaaacgaaatgctttaacgcctctttgcgctgcgcgccgcagataagaccgccggtgcagcgcgccacggcctcgccttccacgcgctcaacgtcggaaccgcacaccgggcagtgcagcgggaacaccacttcgcgcgcatcatgcggccgacggtcttccagcacgcccaccacctgcgggatcacgtcgccggcgcggcgcacgatcaccgtatcgccgatgcgcagccccaaccgctcaatttcatcggcgttgtgcaaggtggcgttgctgacggtcaccccggccaccagcaccggctcaaggcgcgccaccggcgtaatcgcgccggtgcggccaacctgaaactccacttcgcgcaccacggtgatctgctcctgcgccgggaatttgaacgccgtcgcccagcgcggcgcacgcgccacgaagcccagcgtttcctgcagatcgatgtcgtcaatcttgatcaccacgccgtcaatatcgaaaccgagctgtgcgcggtcccgctcgacctggcgatagaacgccagcacttcctcgctgccggtgcggcgctgggcgcgatcgctgaccggcaggccccaggccttgaactgcatcaggcgctcaaagtggctgcgcggcagctcgccgccttccagcaggccaacgccatagcagaagaaggtcagcgggcgtttggcggtaatgcgcggatcgagctggcgcagcgagccggcggcggcgttgcgcgggttggcgaataccttgccgtctttgcgccgggcttcttcgttcatctgttcaaacccggcctgcggcatgaacacttcgccacgcacttccagccggcgcgggatgttgtcgccggtcaggcgcagcgggatggctcgaatggtgcgcacgttggaggtgatgttctcgccggtggtgccgtcgccgcgcgtcgccgcgcgcaccagctcgccgtcttcatacagcaggctgaccgccaggccgtccagcttcagctcgcagcagaaggtcagcggatcgctgcttttgagcctgtcctgcacgcgcttgtaaaacgccaggaagctctcttcgtcaaacacgttgtccagcgacagcatcggcacttcgtgacgcacctggtcgaacgccgccagcggcgccgcgcccacgcgctgggtcggcgaatcggcggtgatcagctccggatgcgcgctctccagctcgcgcagctcgcgcatcaggcggtcatattccgcatccggcacttccggcgcatccagcacatgatactggtattcatgatggcgcagtgtggctcgtagttgattgatttgttggattatcgattccatggctcaccatcaaagataaaaaacccccggctagcgggggctttgttgttacggatgttcagtgcgcgcggcaatccggtcaggcgttgttttccaacacttcacggatacgcgctttgtaggtttccagcttctgcggcgtcatcatgcgacgctcgtcgtccagcaccacgccgcccacgtcgtcggcgatgcgctgtgccgactgcagcatcagcttgaagttctgattggcgtcgccgtaagacggcaccatcatgaacatcgacacgcccggtgtggagaagtcggacatcatgtcaggatcgaacgaccccggcttgaccatgttcgccaggctgaacagcaccgggccgctgccggccgggctgatatggcggtggaagatgcccatctcgccaaactggaagcccgcctgcaacacgctctgcagcagcacttcgccgccgattacgccgccctgatgggccgcgacgtgcagcaccagcacggtctctttcagcttggcctgaattggcgcagccgccggctgttgtggctgtggcgcaggctcctgcgccggcttcacttccggcgcgggctgcacaggggccggctcggcgtggaatgccggttcagccccctgcggcgcctcatgttcatgcggcagatcgtcgacgcgcggctcacggcgcgcggccggttgcggttgctgcggttcggccggttcttcgtccggcgcgtagttgttcagcaggatgtcatcgtactccggccgctgagacagcggaggcggcgtctgatgagcagtcggctgaacggcgcggggcgcaggcgcagccgccggagcgggcttcggcgcggccacgggttcttcgcgtgcggcatcgaaatggccgaatgacggctcgtcttgcgggtgagcggcgcgtacgcgcacctcaccgacgccttcttcgagatcgtcgttcggagtttgttcacgttccttttgggaacgtttggctgggcgatcgcggaagagcgctgaccgttctttgcgactggtccacagaccgtgcaataacagcgctattatggcgatcgcgccaacaacgattaatatcagacgcaaatcctgcatcattgctatctctgttgttccaatacattgccaccgcggcaaacattcactctttaactctatttgcccgcgcacacaagtgcaagtccgtgctgaactttatgccaataaagatgattatactgcctttttctgctggtttttcagccaaccctaccctagccagtggaaaatcatccctatatgataatgatgcctgttcagacaacgagataacttaagatatgtcctatacgcagccctctccccgatcgaccagcggcattcactatttcgccgaaggctggcgtctgatttcgcgcccggggattaaacgctatgtggttctgccgttgctggtcaacgtgctgctgatgggttccgctttctggtggctgttcagccgcctcggcgactggatcccggcgatgatgagccacgttcccgactggctgcaatggttgagctacctgctgtggccgctggcggtcatttcggtgctgctggtgttcagctatctgttcagcaccctcaccaatcttattgccgcgccgttctgcggcctgctggccgaacagctcgaaggcagcctgaccggcaaaccgctgccggacaccggcctgctcggcatcgccaaagatctgccgcgcatcatggcgcgcgaatggcgcaagctgatgtattacctgccgcgcgcgctgctgctgctggcgctgtacttcgtgcccggcatcggtcaaacggtggcgccggtgctgtggttcctgttcagcgcctggatgctggcgatccagtattgcgactatccgttcgacaaccacaaggtgagctttgccgacatgcgccgcgcactgcgccagcacaaaaccgacaacctgcagttcggcgcgctggtcagcctgttcaccatgatcccgatcctcaatctggtgatcctgccggtcgccgtctgcggcgccaccgcgatgtgggtcgatcgctaccgctcgcaattcgtccgataaccgccgttttttgccgccgatagcgcggaaattttcgacagggcgcgcatttcgcgcccttatcattgtgcttaaaacttatttcctaataacatatagatataccaattctttacttccctgccggtactgttagcgtatgctttcgatgttccccacattttcatagagttaaaggacgggctatgagcaagatatatgaagacaactcattaacaatcggccatacgccgctggttcgtctgaaccgtatcggcaacggacgcattctggccaaggttgaatcacgcaacccgagcttcagcgtcaaatgccgcatcggtgccaatatgatttgggatgcggaacaacgcggcgtgctgaccgccggtaaagaactggtggagccgaccagcggcaacaccggcatcgcgctggccttcgtcgccgccgcgcgcggttacaagctgacgctgaccatgccggaaaccatgagcatcgagcgccgcaagctgctcaaggcgctgggcgccaacctggtgctgaccgaaggggcgaaaggcatgaagggcgccatcgccaaggcggaagagatcgtcgccaccgatccgaaccgttacctgatcctgcaacagttcagcaacccggccaacccggccatccatgaaaaaaccaccggcccggaaatctgggaagacaccgacggggaagtcgacgtgttcatctccggcgtcggcaccggcggcacgctgaccggcgttagccgctacatcaaaaacaccaaaggcaaagccatcaccaccgtggcggtagagccgaccgactcgccggtcatcagccaggcgctggccggtgaagagctgaagccgggcccgcacaagatccagggcatcggcgccggcttcattccgggcaacctcgatctggatctggtggatcgcgtcgagaaagtctccaacgacgaagccatcagcatggcgcgccgcctgatggacgaagaaggcatcctggcgggcatctcctccggcgcagcggtcgcggcggcggtgaaactggccgaagaaccggcgttcgccgacaagactatcgtggtcatcctgccctcttccggcgaacgttatctcagcaccgcgctgttcgccgatctgttcaccgagcaggaattgcagcagtaattccgccactgcacaaatcgctaaaaaagcaccctgtagggtgcttttttgtggactggatcaaactttatagcagtccaagattgcttttgcccgtcgcctttagtatttaacggtgcattatttcgatgcgcaaaattaatcactctccgagcccggtcgaggctgaatcgatttactcatctgtcgccgacgcggcgaatcgggcataatggggagcggattggaacgacgtctaaagccgagttttttgatctgaagtgcctaacgcgtcgttttctgttgcatcaacgttcgcccctgtccatagtcaggcgctataaccagacaagttaaagtcagccccctgggctaaactttaactccacaacattaatccaataagttggggaaacatcaatgttccagcaagaagttactattaccgctccgaatggtctgcatactcgccctgccgctcagttcgttaaagaagccaaaggcttcacgtctgacatcaccgtgacctccaacggcaaaagcgccagcgctaaaagcctgttcaaactgcaaactctggggctgactcaagggaccgtagtgaccatctccgctgaaggtgaagacgagcagaaagccgttgagcacttggtaaaactgatggcagagcttgagtaatcggcccgtctttttagttaacaccagtcaagagtaaggtagggttatgatttcaggcattttagtatcaccgggcatcgcttttggtaaggctctcttgctgaaagaagacgacatcgtcatcaaccggaagaaaatctctgctgatcaagtagagcaggaagtctcgcgttttctggccggccgcgcgaaagcgtccgaacagctggaagcgatcaagaccaaagctggcgaaaccttcggcgaagagaaggaagctatcttcgaaggccacatcatgttgctggaagacgaagagcttgagcaggaaatcatagccctaatcaaagacgatctggcctccgcagacgccgccgcctacaccgtgatcgaaggccaggcgaaagcgctggaagagctggacgacgaatacctgaaagaacgcgccgccgacgtgcgcgacatcggcaagcgcctgctgcagaacatcttgggcatgccgatcgtcgatctgggctccattcaggacgaagtgatcctggtggccaccgatctgaccccgtccgagaccgcgcagctgaacctggacaaagtgctgggcttcatcaccgacctcggcggccgtacctcccacacctccatcatggcgcgctccctggagctgccggcgatcgtcggtaccagcgacgtgaccaagcaggtgaaaaacgacgactacctgattctggacgcggttaacaacaaaatttacgttaacccgaccgctgacgttatcgatcagctgaaagccgcccagaaccaatacatcaccgagaaaaacgatctggccaagctgaaggacctgccggcgattacgctggacggccatcaggttgaagtctgcgccaacatcggcaccgtgcgcgacgtcgcaggtgcagagcgcaacggcgcggaaggcgtcggcctgtatcgtaccgagttcctgttcatggaccgcgactcgctgccgaccgaagacgagcagttccaggcttataaagccgtggcggaagccatgggctcgcaggcggtgatcgtccgcaccatggacatcggcggcgacaaagacctgccgtacatgaacctgccgaaggaagagaacccgttcctcggctggcgcgccatccgcatcgcgatggaccgccgtgaaatcctgcacgcccagctgcgcgccatcctgcgtgcctcggcgttcggcaaactgcgcatcatgttcccgatgatcatctccgtggaagaagtgcgcgatctgaaaggcgaaatcgagacgctgaaggcgcagctgcgcgaagaaggcaaggcgtttgacgagagcatcgaagtgggcgtgatggtggaaacaccggccgcggcggtcattgctcaccacctggcgaaagaagtcgacttctttagtattgggacaaacgatctaacccagtatactctggcggtagatcgcggcaacgagctgatttctcatctctataacccgatgtccccatcagtgcttggcctgatcaaacaggttattgatgcatctcacgcggaaggcaagtggaccggcatgtgcggcgaactggctggtgatgagcgtgctacactgttgttattgggcatggggctggatgagttcagcatgagtgcgatttcaatcccgcgcatcaagaaaattattcgtaacacgaatttcgaagatgtgaaggcgttggcagcgcaggccttggcacagccaacggcacaagacctgatgaattgcgtcaataaattcatcgaagaaaaaacgctctgctaaacttccacgacactggaacgccgcccaatttaatgcttaggagaagatcatgggtttgttcgataaactgaaatctctggtttctgatgacaagaaagacacgggcactatcgagatcgtcgctcccctttctggcgaaatcgtcaatatcgaagatgtgccggacgtagtgttcgctgaaaaaatcgttggcgacggtatcgccatcaaaccggccggcaacaaaatggttgctccggttgacggcaccatcggtaagattttcgaaaccaaccatgcattctctatcgaatccgacagcggcattgagctgttcgtccacttcggcatcgataccgtagaactgaaaggcgaaggcttcaaacgcatcgccgaagaaggccagcgcgtcaagaaaggcgacgtcgttatcgagttcaacctgcctctgctggaagagaaagccaagtcgaccctgacgccggtcgttatctccaacatggacgagatcaaagagctgatcaaactgtccggcagcgtaaccgttggcgaaaccccgatcatccgcatcaagaagtaatcgaagttatcgcgaatgagcagtaaaaaacggcgcccttggcgccgtttttttatcccttcggggtatccccatctcgctgcgtcatgacgaccagcgcggcacgcgcagagtgatgatcagcccctctttgtcgccgttgcgagcctcaacctggccgccgtgcgccagcaccaccttgcgggtaatcgccagccccaggccgtagcccttgcccgacagcgccgatttcacgcgtacgaaaggatcgaagatgctcgacagcttcgactcctcgacgcccggcccctgatcgctgacggcgatctgaaactgattgtcgacgcgcgacagcgccaccgtcacccgctggccgtggctggagaagcgcaacgcattacgcacgacgttatccaccgcacgccgcatcagctccgcattgcccttgacggtgtactccacgtccgattcggcctgcagcacgatatccacgccgggcacctgcgcctcgtagcgcgcatcgctcaccaccgcgtccaccaggccgtacagatcgaaatactcttcgtccggcaggctgctgtgttcggtacgcgacagcgccagcagctcgccgatcattttgtccaaccgccccgactcatgttcgatgcgcttcagcgaggtttcgacgttgccggcattctgccgcgccagaccgatggccaactgcaggcgcgccaacggtgaacgcagttcgtgcgagacatcgtgcaacagctgctcgcgggcgctgaccagcagctccagccgctcggccatggtatcgaaatcgcgcgccacgtcagatagttcgtcatgacgccgccgcatattcgggtacagccgcaccgacagatcgccctgcgccacccgatccaggccgccgcgcagctggcgcatcggccgggtcaggttccaggccagcacggcgctgaacagcaaaccgcccagcccgccgacccacagcatcggcgcaggaatgttgaagaagtgggaacgccgctccggccgatactcttcccgcagcccgcgcacgttataactcagccagtaaccctgcccttctccggtctgcacccaggcggaaatcgctttcggcatccgtcgcccttcaaacaccggttcttccggctcaggcggcggttgggtcatcggggtcaccgacagtagacgccgatcgtcctccggccagtcgcgcatcagggcttccagcgccggcatgccgccactgcgcaactgggtggcggcggaggtcagctgcaggcctatcgcccgccgcgccatggaattctccggcggcacatagcggtcgccataaagagaaaacgccacccacaaggcctgcgtcatgatgagaaaggtcagccaaaagccgagcaaaattttccagaacagtcttccgcgcatgtctggttaccgtatgcgatagccgatgctgcgcaccgtctcgatgctcagcttactgccggccagcgcgctcaacttctggcggatattgctgatatgcacgtccacgctgcgatcataggcctcgcgcgggcgccccagccccttctcggacagttcgtccttcgacaccacgcggtccggcgtgcgcagcaacagctccagcagattgaattccgaagccgtcagatcaaacgccttgccccgccattcgctgctgcgggtagaagggttcagcgtcagctcgccgaagctgatggcggcctcgtcctccgcctcttgcggccgctcttcgaaacggcgcagcaccgcgcgcagacgcgccaccaattcgcgcgggtagcacggtttgggcatgtaatcgtcggcgcccatctccaggccaatcacccgatcgatgttgtcgcctttggcggtcagcatgatgatcggcagccggctctttttacgcacgtcgcgcagcacgtcgatgccgctcatatccggcagcatgatgtcgaggatcatcgcggtatagtcgcccgacagcgcgccctctacccccgccttgccggtcagcaccagcgtggcgtcgaagccttcgcccgtcaggtattcgctcagcatggtgccaagctccaggtcatcgtcgaccagtaaaattttcatgccttgctccttcaccgattttcgttattttcccgccaattccgccggcccgcagccggttttactcaatccttacacatcgctcttggcgtctcgccaccgttagtgtggccgctgtcgcgcgatttctctacttcagtcaggggattggcgcgcgagcaggcgatagccgccgcgtcggcgggccggacaggcagtctgtaacagggaggtgagaaggcgtttcccggcgggacgcgccgccgggaaggaacggtcagtcgaacacgccggtggagaggtaacggtcgccgcgatcgcagacgatcgccaccaccacgctgccgggattagccgccgcgacgcgcagggcgccggccaccgcaccgccggagctgacgccgcagaaaatgccttcacgctgcgccagctggcgcatggtctgctcggcatcgcgctgctcgatatccaacacctgatccaccagctccgggcggaaaatacccggcaggtaagcgggcgcccaacggcgaatgccggggatgctgctgccttccgccggctgcaggccaatgatctgcacctgcggattctggctcttcaggtaaccgcccacgccggtaatggtgccggtggtgcccatgctggaaacgaagtgcgtgatgcgcccttcggtctggcgccagatctccgggccggtggtagtgaagtgggcatagggattgtcgaaattgttaaactgatccagcaccttgccctgcccctggcgctgcatctccagcgccagatcgcgcgccccttccatcccctgctcacggctgaccaggatcagttccgcaccgtaggcgcgcatcgccgcctgccgctccaggctcatgttctccggcatcagcagcttcagcgcataacctttcaatgcagcgatcatcgccagtgcaatgccggtgttgccgctggtagcctcgatcagcacgtcgccgggcttgatctcaccgcgcagctccgcctgctggatcatcgccaacgcggcgcgatccttcaccgatcccgccgggttattgccttccagtttgacccatacctcgctgcccgcctgggcggccagccgttgcagttgtaccagcggggtattcccgatgcattgttcgagcgttgtcacgatctttgcctgtgtgttggtgtgcgtaaagtaaaaaggcaaccccggggttgccttaaagaaaaggactggctaaaacctatcaggcgcttttggctaacgcaacaggttgcagcagttgatcgccggcatacagccgcgcattgaggctgccgacgtaataacggccgccgcgcaccggcgtagcgttgccttccggcagcaccacgccgatcggttcctggtgccagccgatcggctgcaccgtcagctgccagaaatggccgcgcgggctgacttccaacacctgaaccggcagtgggcagcgctcgctgctctcggtcgccacttccatttcccacgggcgcaggaacagatcgacgctgccctggtgcatcggctggaacgacagcggccactggtgcgcgccaacgaacagctgggagccgcgaatttcgccgttcagacggttcacttcccccataaactccagcacgaagcggctggccggctcgcgcataatctcctccggcgagccaacctgttcgatattgccctgactcatcaccacgatgcggtcggccacttccatcgcctcttcctgatcgtgggtgacgaacacgctggtgaatttcagctcttcgtgcagctggcgcagccagcggcgcagctctttgcgcacctgcgcatccagcgcgccgaacggttcgtccagcagcagaatttgcggttccaccgccagggcgcgcgccagcgctacgcgttgtttctggccgccagacagctgcgacgggtagcgattggctaaatggccaagctgtaccatgtccagcaactgagtgactttctgtttgatcgccgcggcattcggccgctcgcggcgcggcagcacggtcaggccgaaggcgatattgtcgaacaccgtcatgtggcggaacagcgcatagtgctgaaatacgaagcccacgcgcctgtcgcgcgcgtgcatgtggctgacgtcgatgccgtggaagcccagcttgccgccgctctggctttccagcccggcgatgatgcgcagcagcgtggtcttgccggagccggacggcccgagcagcgccaccatctcgccggaagcaatatcgagcgagatatcgttcaataccttggtgcgaccgaagtacttgttgatgccgttaatctcaatgctcatgattttcctcccgctcgagacgcgcgttttggcgttccagacgccactgcagcgcgctcttcaaaaatagggtaacgatcgccatcagggtcaacagggcggcggcggtaaaggccccgacggtgttgtaatcctgctgcaacagctcgacctgcagcggcaggctgtaggtctctccgcgaatcgaaccggacaccaccgacaccgcgccgaactcgccgatggcgcgcgcgttggtcagcaccacgccgtacagcagcgcccagcgaatgttgggcagcgtcacgcggcggaacatttgccagccggacgcccctagcaggatggcggcctcatcttcctggctgccctggctgagcatcatcggcaccagctcgcgcaccacgaagggacaggtgacgaaaatggtcaccagcaccatgcccggccaagagaacatgatctggatgttatgcgcatccagccagccgcccagcaggccgttgctgccataaaacagcagataaatcagccccgccaccaccggtgaaacggcgaacgggatatcgatcaacgtcagcagcaactggcggccggggaaggtgaaacgcgtcaccagccacgccagcaacgtgccgaacaccaggttgaacggcacggtgatcagcgcgatcaagaccgtcagccagatggcgtgcagcatgtccggatcgagcaagttgctccacatcgcgccaacccctttggagaaggcctcggcgaaaatcgacatcatcggcaccaccagcagcagcaccgaaaacagcgtaccgatggcgatcaacgtccacttgccccagttgacgcgcgggcgctcggcgccgttgaaggcggaaacatcagccatcagtgccctcctcccaaacgtctgccgaagcggctttgcaagacgttaatgctgaacagcagcagcagcgacgccgccaggatcaccgaggcgatggcgctggccgccgggtaatcgaactcctgcaaacgcacaaaaatcatcagcgaggtcacttccgtcttccaggcgatgttgccggcgatgaaaatcaccgcgccaaactcgcccaggctgcgggtaaaggaaatggcggtgccggccagcagcgccggcgccacctcaggcaacaccacgcggcgaaagctctgccaacgcgtggcgcccagcgtctcggccgcctcttcgtattccggccccagctcttccaaaaccggctgcacggtgcgcaccacaaacggcaggctggtgaacgccatcgccaccgcgatcccaagccaggtgaaggtgaccttaatgtcaaagtgcgccagccactgaccgtaccagcccgtggtggaaaacagaccggccagcgtcaggccggccaccgccgtcggcagcgcgaacggcagatcgatcaggccgtccagcagcgaacggccgggaaaacggtagcgcgtcaggatccaggccatcagcatgccgaacaccgcgttgaacaggctggcgacgccggcggccagcagcgtcactttgtacgccgccaccacctgcgggttggaaatcacttcccagtactgcgccaggctcatctgcgccagctgcatcaccagcgcactgagcggcagcagcaggatcaaacaggtataaaacaggctgctgccgaggctgaggccaaatccgggcagcacccgtttactggacgacaacgccaacatttacttgcgccctgccgctaacagctgatccaactcgccgccggtggcgaagtgagttttcatcacctgcggccaaccgccgaactggtcttccacccggaacagttgggtgtccgggaattgccccttcgccgccgccatcgctttctggtcatagacgcggtagtagaagctggtgatcacctgctgcgccgccgggctgtagaggtagttcagataggctttggccgcctgctcggtgccgttgcgctctacgtttttgtcgacccaggccaccgggaactccgccagaatatcgaccggcggcacgatcacttcgtacttgtcttcaccgtattgcttgcggatgttgttcacttcggactcgaagctgatcagcacgtcgcccaaaccgcgctcgacgaaggtggtggtcgcgccgcgaccgccggtatcgaacaccagcacgtttttcaggaagcgggtcatgaaggcgcgggtcttggccgcatcgttgccgtcagcctggctggcggcgccccaggcggccagataggtgtaacggccgttgccggaggttttcgggttcgggaacaccagcttcacgtcgtcacgcaccaaatcgttccaggtgtggatgcccttcgggttgtccttgcgcaccaaaaacgccatggtggaatagaacggcgagctgttgttcggcaggcgcacctgccagtccgccgggatcagctgcccgcgatcgtgcaggatctgcacgtctgtgacctggttgtaggtcaccacgtcggcccgcaggccctgcaggatcgccagcgcctgcttcgacgagccggcgtgcgattgtttgatggtcagcttgtcgttcggatgctgttgattccactgctgttcaaagccgggattcagcgcgacgaacaattcacgggaaacgtcataagagctgttcagcaattccgccgccgacgcggcgccgctcgccaacagcgcagccgccagccaacctttcagcacgagatttttaacccggttttgtttcattctgcaccttatcactgagtcattccttcaggctttcgccttattgacgaccagtgtatttataactcggtgcggagctgtaacgcttttatataccgtttagtgatttacaagcatcaaacgctataaggcaggaaatgcgaggcgttttgggaagggaaaacagaccgaagccggacgcgccggcttcggcgacggcatcaaagtgacagcaggcgcgtcagcgatggcgcaaagtagtagctgccggtcaccgcacggctgaagcgcaacatcgcgtcacgtttgccgtccagatcgccgaacatgctcagcagctgctgctcgatattgtgcaagcgcgcgcaataggcgatgaagaacaggccgtgcttgccgctggcggtgccgtaaggcaggctctggcgcaaaattttcaggcccttgccgttctctttcagatcgacgcggctgacgtgcgaggtatccgggcgctgatcggccggcagctcttcgctgtcgtgcttggtgcggccgatgatctgctcctgctgttcggtggtaaagcgctgccactggcgcaggttgtgctcgtagcgttgcaccagcacatagctgccgccggcgtcctcttcgccttcggcgatcgtcgccactgccgggcgctggtcgccctgcgggttttcggtgccgtcgatgaagccgctcagatcgcgctcttccacccagcggaagccgtgggtttcttcttcaatcttgatgacattgccgaacgccgccagcgccgcctgcgccagcgtgaagttgacgtcgtggcgcagcgactggatgtggatcagcatatcgcgctgggtggccggcgccagccctttgccgagcggcgtgaacggcttcaactctttcgcaccctggccgctggagagatcgtgccaaacgtcgtaaccgaaagcgatcaccgcgccgaggcacgcatcggggaactgctgctgcagctcgctcagggtctgacaaaactgcttgcagccctggcgcaagtcggcgaattcgccctgtacgctggcttccataaaaatggcgaaacggcagtgctccagcagaatgccgctctgaacctgtgtcatgttgttatcctcaataccaaaaccaggcaacaggtatggcggttgacgcgcgggttccctgttacaaacgcgcgctatcataccgcaagcgcggacgattgccttgcagcagcgcaaagaaaataggggtaatggcttgaaaaggcaggcgccgcgaaccggcgcccgttgaacacgttactgctgcggcttggcgtgccagatgattttgctgaccgtccagcttttcagggtgtcgtccggcggaatgatatcctgcgccccggcccacttgccgctgaagatgtaggtaacgtacttgctctgctccgccacgcactccactttaccggcgtcttcgccgctgcccggcttacaggagccgaacgccttgctgtacatatcgccgaacggcgtgccgagcttgttgccccactccgtcgccactttcggatccagcacgtccacgcgctgcaggcgccctttcggttcgccagtgatcaccagtttcacttcgtcgccggacagcgcctggtaataagagacgatctggccgttgttggtcgccatgccgccgcgcaggcggtagttgccgtccagcccgtcattgatggcgctttccgacatcggcgtgccggcgttgagcttgccgacgcccttggcgccgacctccaggctgctgccgaaccagttgaacggcgacaggctggaccaggagaaattggacatgctcgaacagccggtcagtaacagcggaagccctaacaacagggggcgaatattcatctctagctccttagacatcaatggcacggcgcggtagcccgcgcctgccgcattcggcgttttgctgcgtgccagcctctcacaacggcccgcactacgccaacggttgccagcttggagtgcggaaaatgcgaaaagtgccgcacttctcggcaattagtcggtatgctccggcggcgcgaaacaggctttcaggcgcgcattcagcagcagatagctcagcgccagcgcgtcgagcaacaccaacgccagctccagccccggcgcatcgccgtcctggcgccacaggctgaacagcgagccgccgagcgacgccagcagcgagacagcaagcccccagcgccagccgcgccacagccgcggccattggtggcgacggccgctcagcaaaaacgccagcgccgccggcaggccgagcagcatgccgtaccaaaagcgttgggtatccggataaaacagcgccaacaggctttcgccctgctcgcgcgaaacgccggccatcacgaacaacagccaggtgcgcgcctgcaaaatcagcacggcccaaaatcccagcggcagccgcagcgcgccatgctggtcgtaatcgtccggggaaaaccggggggagaatggcttcaacgctcgttccttgccacagaataaagactatggctacagatgggcgccgccagcgagaatttcaatgcgtcggcttaagaagctcttaagatcggcgtgttttaatccttatcaccaagcaagcacccgatatcagcgggatgtgattttcgataacgataaggaagcgcaacatgaaaaaactgactctggccgctctgatcgcgctgtgcagcgcaccggtactggcgcaacaaggcgggttcctcgatccggccgcgccgcaggcacaaacgcaagccgctccgcagggcggtttctccggccccagcgcggcgctgaccaccgtggacaaggtgaaatcgctgagcgacgacacctgggtgatgctgcagggcaacatcgagcagcgcatcggcgacgatacctacaccttccgcgacgccaccggcaccctgacggtcgagctcgatcgcaagcgctggaacggccaaaccgtcacaccgaaagacaaggtgcagttggaagggaaagtggataaagactggagcagcgtggaagtggacgtaaaaaccgtcaaaaagctgccgtaatgcgctgcggcgggcgggctataccgccgtccgccgctcgatcaatattcctgatcttcgatcagccgtttgcccaggctggtgatgccctggatttcgtagccgagcttctcgtacatctcaaccaccgtgtcgttgtcttcgcgcaccatgatctggatcttcgggcagccgcgggcgatcagcttcttctccagacggttgatcaacgcattggcgatgccgcgcccgcgatagtcgggatgcaccccgaggtaatacgccgagccgcggtgcccatcatagccgcccatcaccgaaccgaccacttcgccgccgacttccgccaccaggaacagctccgggtcgtggttcagcttgcgctcgatgtccatttccggatcgttccaggggcgcagcagatcgcagcgctcccacagggtaatgacttcttcaaagtcgtcttgtcgaaatacgcgaatttccatcgatgttggccgctgttaattaaggtgtttatctgattatcgcgtgattattcacttacgcaatatcaaactgcgatttagcgcgctatttgcccaggaatcgccggtaacaagcgtaataaatggaaatagttatcgggtcgattaatgattatcaatacgatataacgtcgcaaaatagaaacgtcgacggagcgttgcgtcatgaaaaagcagggtaaacccttcctcaattttaaaccgcttaccgtttccccgacgcgacgccaacttttgctttccggcctggcggtggcgctgttcggcgtgaaaagccaaaacgccaaggcggaaggcctgctgcgcaatcagcacagcaaaccggcggcgaaactggccggcggcaaaaagcgggtgatgatcgatcccggccacggcggcatcgactccggcgcggtcggccacgaaggttcgcaggaaaaacacatcgtgctggaaatcgccaaccacgtgcgccgtttcctgcatgagcacgatcacatcgaggcgcgcctgacgcgcgaagaagacgaattcattccgctgttccagcgggtggagatcgcccaccagcaccaggccgatctgttcatttcgattcacgccgacggtttcaccagcccgtcggcctccggcgcttcggtattcgccctctccaaccgtggtgccagcagcgccatggcgcgctacctgtccaaccgtgaaaacgccgcggacgacgtggcgggcggcaagtacaaggatcaggacaactacctgcagcaggtgctgttcgatctggtgcaaaccgacaccatcaacaacagcctgacgctcggccgccacgtgctcggccaaattcgcccggtgcatcatctgcacagcgacagcaccgaacaggcggcgttcgcggtgctgaaatccccgtccatcccctcggtgctggtggaaacctcgttcatcaccaacccgaacgaagagcggctgctgggcaccaccgcgtttcgcgagaaaatcgcccgcgccatcgcggacggcatcatcaacttcttcgactatttcgacgcacaccaacgcaaaccccgctgatgccgcgggcggcgaataagagtatactcagcgccttgttcagccagacgctataaagaccccgcatgagtttacctaacatcgctgaagtaaaatccttcctgctggcgctgcaggatcacatctgcgcgcagctcgcccaggccgacggcggcgccgtgttcaccgaagaccaatggacgcgtgaagaaggcggcggcggccgcagccgcgtgctgaccaacggcgcggtgttcgaacaggcgggggtcaacttctcgcacgtctccggcgccaccctgccggcctcggcgaccgcgcaccgtccggaactggccgggcgcagcttccaggcgatgggcgtctcgttggttatccacccgctcagcccctatgtacccaccagccacgccaacgtgcgcttcttcatcgccgaaaaaccgggcgaggcgccggtgtggtggttcggcggcggttttgacctgacgccgttctacggtttcgcagaggatgccgtgcactggcaccgcaccgcggccgagctgtgcgcgccgtttggcgacgaggtttacccgaaatacaagcaatggtgcgacgattacttcttcatcaagcaccgcaacgaagcgcgcggcatcggcggcctgttctacgacgatctgaacacccctgatttcgaccattgtttcgccttcacccgcgcggtgggccagggcttcctcgacgcctatctgccgatcgtcgaaaaacgcaaggccttgacctggggcgagcgcgagcgccagttccagctgtatcgccgcggccgctatgtggaattcaacctggtgtgggatcgcggcacgctgttcgggctgcaaaccggcgggcgcaccgagtccatcctgatgtcgatgccgccgttggtgcgttgggaatataactaccagccggaggccgacagcccggaagcggcgctgacgcgcgatttcctgccggtgcgcgactggctgcaggagccgaaatgatgcagatttgggtcgatgcggacgcctgtccgaacgtgatcaaagaggtgctgttccgcgccgccgatcgcaccgccatcaccgtcacgctggtggcgaaccagccattgcgcacgccgccgtcgaagtacatccgttcgctgcaggtggcggccggtttcgacgtggccgataacgagatcgtgcgccgctgcgaagcgggcgatctggtgatcaccgccgacatcccgctggcggcggaggtgatagagaaaggggcggtggcgctgaacccgcgcggcgagcgctatacgccggacaccatccgcgagcgcctcaacatgcgcgattttatggataccctgcgcgccagcggcattcagaccggcggcccgaacgccctgaaccagcgcgaccgccagcagttcgccaacgagctggacaaatggctgctgcaggcgaaacgggcgcagtgactgcgccctgctctgctgcggtttagaagcgaacctccccgccgaagatataagtccgcccacgggcggtgttggcggccgtcgcgtcatccccttggatcggcaacatattcagtttgttcaacgcctcggaatagctcttgttcatcacgttttgcacgctaaatttcagcatgacgttgcggttgatctgataagtgctgtacaggtcaataatggtaggaatgttcggcatctcttgcttcaggatttcaccggtcacttcgctctgttcataatccggcgacaagcgacgcgttttgcccgtgtatttcacgatgctgccgacggttagcgattcatcaaggaaacgcaccccggtatccaacgtaaaatacatgtccggtagttcattgatatccccggcgccgaaataggtgctggcgatggaggtcggctgctcggtgtgttgcttgctgaaagagacgcgggcgaatgctcgaccggcgtcatagttggcttcaacctcaacaccatgcatgcgtaccggcgtcagagagttgacgtagatatacatgttgtccgagtaatcttcgctcgcatcggcccaatcgttttccagattttcgcgataactgcatttccgcccattgcggcataccatgtaggactcgctgaagatgtaattacgtaccttactggtatagcccacgaccttaaggcgcaatgaatcttccttcaccaacagatcgtgtccgttggcattgaagccggcctgccaggtttccgcccgttcccccttgaggaacgggttcatcgatgcgccacccgagttggaatagaacacttcttgaatgttcggcgcacgcatcgatttgctgtagctgacgaatggctgcaaccacggcgtcacctgcgccgatagcattaccgaaggattgaacccttgctctttcaaattgatgttcgcggccccttgcgggaagcattccacgcgataatcgcattcaggcttgtagccggtcagcttgttgctggtgtagttcagattgagatcgagttgataaatatcccggttaagctgcaggccggtatataaactgccgattcgctgctcgccggatggcgcgaaggtgttattttctatcgcctcctgcgccgtctgcgcattctctatcgccgattcaacatgtttgcggtattggttgcgcatcagcttgccgccataactgaaggctacatcagtatccagcaggctgaatcggctggtgttgttgatatccagcgcatcggagcggttttttgcattggtgttaaagaaggtgaatagcgaaccgccgtcgtatttctgattgcctttactggtgctgacggtgaagtttaaatccaccagctccgaaaacggcgcatagtgatatttgaggtagaggtcatgactatcgatatcgcgccgagaaaagcggttttggtagttcctggcggaaaactcaatgctattgaactcgttaggcttgatatccagtttgaacagctgtgacttgggattttgcttcataaattcatcgtacccaaaatcttcgctgctgataccgtcgccattgttgaagttcgaataaatagagctcccactgaccgcggccatcgcgccaatgctgccggtatcggtaaacgcctgtcccttaccggcgacggcgatcatgccgctgcggccaatgccgttgctgccgaccgagaatttggttctcacgccgaaaggattgccggaaaagatcacatcatcaacaccgatagtgcggaagttggcgctgcccgccaacgcgtttacgccgctgccgccgctgttctcaccgcgcgccacgtccacgccgacgatgaaattggggtcaatcaaaacgcccgcctggttattggtcgaaccgtgcgatatcacgccagacgtggaagtaccgtaatagttttgggtaatgccatcgaccatggtgttgacccgaccaaagccgctcaggccgcgaatattgacgctgaccgccccctgactggggtcgatctgggtataggtgcccggcatgctgcgcagaatgctgtctaccgactccagatttttgttttcgtcgcgcgagctgaatgcgccaggcttcgccaacgcctctttttcgctgctcttgccgccgtcggcggccgagacgttaagcgggctgaacgccacgctgcctttattgttttccgcctgttcctgcgcggccgcagccggcccgtacagcgccagtcccgcgccgatcaggctcgctatcattttgattttcatatatccccagaaatagccaataaggtttgatggccgacaatgcccagcaaaaagcccgccgaaacgcgcggtaaaagattgttattgttttattgcgccgcagcgtgccgcggcgctgaaggttatttctgcgtctgccgatccgccgccaaaataaaggcgtactccagcgcgccgttttccagccgcgccaggcggcccgatttgccgccgtggccggcggtcatgtcggtggagagcagcaacagcgaatcgccctgtttgaaacgccgcagcttcgccacccatttggccggctcccaatactgcacctgcgagtcgtacaaaccgctggtgaccagcaggttcggataatgctgcttgcgcacgttgtcgtacgggctgtaggacttcatcagcgcataggcggccggctggtgcgggttgccccactcctcgtattccccggtggtcagcggaatgctgtcatccagcatggtggtcaccacgtcgacgaacggcacctgcgccaccaccgcgttgtacagctgcggcgcctgattgatcaccgcccccatcagcaaaccgccggcgctgccgcccatggcgtagatgcgtcccggttggccgtagccgccgttgatcaacgcctgggtggcgtcgatgaaatcgttgaaactgttcggtttttgcgtcagcttgccctgtttgtaccagctctgccccaactcgccgccgccacgcacgtggatcagcgcatagacgaagccacgatccagcaggctgatacggttggcgctgaacgccggatccatgctcatgccgtaagcgccatagccgtagaccagcagcgggttatgcccgtttttgaacagcgatttgcgatataccagcgagaccggcaccttcacgccgtcgcgcgccgtgatccaaatgcgttcgctgtgatacaggctgggatcgacgcctttcacttcctgttgcttgagcagggtgcgctcgcccttgttcagatcccactcataggtgcgggtcggcgtggtcatcgccgaatagccgtagcgcaaccgatcgctgtccggctccgggttatagcccaaccaggccatgtagctggcgtcgtcgaacgggatggcgcgctcggttttaccgtcccagctgatttgccgcagctgcaccagtccgttggcgcgttcctgcaccaccagccagtcgcggaacaggctgaagctctccacctcgtgctgcgcctgcggcgcaatcagcgtctgccaggggttgcccgccgccgccgtgcggtacaggccgaagttcggatcctgatggttggaacgcagatagaactcgccgcggtagtgatcgagataatactcgcggccattttgccgggcggcgaacagctgcggctcgcgctgcggctggttggcgtcgatcaggcgcacttcggaggtggtgttgccgctgatggtgagtatcaagtagtcacgcgaagaagaacggctgaggctgaggtagaacgccggatcgttctcctggtacaccagcttatcttccgccgtcggcgtaccgtactgatggcgatagacctggtacggcaacagcgtttgcgggtggttgcgcacgtagaacagggtttggctgtcgttggcccacaccatgttgccggaggtgttttccagcgtttccggcgaccaacgctcactgtctatctcgcgcagggagatgcggtattggcggcggccctgcagatcttcggctaccgccaggcggcggttgtccagactgacgtccagcgcccccaggcgataataggcatggcctgccgcgcgctgattggcgtccaacagggtttgccacggcgtgtcgccggtgagcgcctggcgctgataccgcgcgaaatctttaccggcggcgtagctttcctgatagcgatagccgttgagctgatacggcaccgaacgatcgtcaggactcatgcggcccagcatctcctgatacagcgtggcgcgcagcttctggtacggcgccatcatctgctcggtgtagcggttctccgccttcaggtagtccagcaccttcggctcttttcggctgtcgtcgcgcagccagtaataatcgtcggtgcgcgtctcgccgtgggccgtcagcgctttcggcgcccgttccgccaacggcggctgcggttgcgccagcgcggcgccggcgacgcctaaagaaagccagagcgcggccgcgatgcggcgacgcggggtgaataacagcggattcataatccctcacgaagtttgaaaaggcggacggcggcgaggcggcgtctgcgggcattaacggcgggcgttcagctccgccagattgaaatcgatcggcatcgttaccctgacggccccctgctgcagcatctccggcggcggcggcggcaacggctgcgcgcgcgacaccaccgccaccgcttcccgatccagcgacgcggtgccggaacgcgccagcaggatcacgttcgatacccgcccctgcgcgtcgacgctgaaactgacctgcggcatgccgctgcgccggcggttgcgggcatccgggggatattccttgatgcggttcagcttgcctttcaccagactctcccacgacagcttggcctgcgcgctgctgttggcatcgctgttgatcggcgcggcggtttggtgggagagcgtctgcgcctgcggcgcggcggcgctggacgcggcggtgttgcgcgtctctttggcctgttcctgcggtttcggctgcgctttttgcggggggcggtgttcggcgcgcttcttctgcgccgtcacgatcttcgctttatcggcgcgcgccagcttaggcagatccggctgttgctgctgctcagcgggctgcgccgcggcggactccgcctgctgcacgcccagcggcagcggtttgctttccggcgcttcaatctgcgccgcccagctcatcatcaccgccggcggcggcagctcgaccggctcgagcgccgtctgcggccaataaaacagcagcaccaacgccgcgtgcgccgccagggcgagcagcaggccgcgcgcccagcgcggctgcggcagctcaaaggccggaagggaataagactgacttaacataggggcattagcttgcttaattgcgaatgattgcagatcacatttactaatgataatcatttgcaactataattaacaccccttttcactgccttaacgtattcatttcactgatggtgtgatccacaggtagtccgccgtgttcgcatcgacctgtacgcccggctccgccagcatcagcaccgtcggcgccgccgccggttgcagatcccgcacgtgcagcggcacgcccaccgatttggcggcgtgatagccgccggcgatcaacagcgcgggcgtgggcgccgccagcaaacgttccgccatgcgccgatcgcgctgctgctggatcgccaacattgcgtgcagttggtcggcctcaatcttgccgccgtgcgaagtgcggatggtctcttccaacgccttgcgcaccgccggctgcgccgatagctgccccgccgggaactgcggctgctgatagaacgccgtaatctcgctgcgatccaggttggctgaccacagcgggtatggcgcgcgcatcgccgccatcgtcaccccgccatacagttcccacttccagccaggctgccaggcgatcagctccgccacgcggccgtcacgcactgtggggtcgctctgcagccactgcttgactttgtccacctgcgcctgctggttcgggttgatcatctccatcagcacgctgccctgcggccgccgctgcggcagttgctgcaccagccattgctcaacctgatggtggtaaggattgtcatgtttttccccgacgatcacccgcggctgctgcgccaatcgcgtcaacagctgctccggcgtcaggctcgcaccgctgtgcagatcggtgatgctccccaaactcgcgatgtcattggccggtgccttcaccggcgtttggctgcaggcgccgagcgccaaggccgccaataaaatcagatatctcatcatgttgtcccattagcgaaaatggcgacattatagataataattatcatttgcatatagatccgacttaacgatttttttacgcggcgatcgccggtggcgcattgcgttaaaaaggcattacgggtataaccaatagccatttagatatttagacgtctatacggatagattattatgcacgcatcggcgcccgccgcagggcagttcaaacgcagcatgaaggcccggcacctggtgatgttgtcgctgggcggcgtgatcggcaccgggctgtttttcaacaccggttatatcatctccaccaccggggcgctcggcaccctgctggcctacctgatcggcgcgctggtggtgtacctggtgatgctgtgcctgggtgagctgtcggtggcgatgccggaaaccggcgcttttcacgtctatgcctcgcgctatctggggccggccaccggctatgccgtcgcctggctgtattggctcacctggacggtggcgctgggctccagcctgaccgccgccggattctgcatgcagtactggttcccgcagtcgccggtgtggctgtggtgcctgatcttctgcgcggccattttcctgctcaacgtcgtgaccacccgtttttttgccgaaagcgaattctggttttcgctgatcaaagtggtgaccattctggcgttcatcattctgggcggcgccgccatgttcggcctgctgccgatgaaagacggcacgccggcgccgttcctgcataacctgaccgcttccggctggctgccgcacggcacgctgccgatcctgatgaccatggtggcggtgaactttgccttctccggcacggaactgatcggcatcgccgccggtgaaaccgagaacccggagaaagtcgtgccgctggcgatccgcaccacggtgatccgcctgatgctgttctttatcggcacggtcttcgtgctggcggcgttgatcccgatggatcaggcggggatcgtcaaaagcccgttcgtgttggtgtttgaacgcatcggcgtgccttacgccgccgatatcttcaacttcgtgatcctgaccgccatcctgtcggcggccaactccggcctgtacgcttcggggcgcatgctgtggtcgctggcccaccagcgtaccctgccggcctactttgcgcgcgtcaatgcacgcggcattccgatcaacgccctgaccttcagcatgctcggcggcgtgctggcgctgctgaccagcgtgatcgcgccggacacggtgttcgtcgccctgtcggcgatctccggctttgcggtggtggcggtgtggctgagcatctgcgccgcccactatgctttccgccgcgcctatctgcgcagcggccagccgataagcggcctgaaataccgcgcccccggctatccattgacgccgatcctcggctttgcgctgtgcctgctggcctgtatcgggctggcgttcgatccggagcagcgcatcgcgctctactgcgggctgccgttcgtcgccctgtgctacctcacctatttcctgacccggcgcgccgggcaaaaaaccgctttgggagaacaacatgtcggttaacaaccccgtcgcccgcctgctggccgaacagccgacgctgatcctggacggtgcgctggccaccgaactggaagcgcgcggctgcgatctgaccgatccgctgtggtcagccaaggtgctgattgaaaatcccgagcttatctatcaggtgcatctcgattatttcaacgccggcgcccagtgcgccatcaccgccagctatcaggccacgccgcagggcttcttgcgccgcggcctggatcaggagcaatcgctggcgctgatcgccaaaagcgtgcagctggcgcaacgcgcgcgccgcgattatctggccgaacacccgcaggccgcgccgctgctgatcgccggttctgtaggcccgtacggcgcctatctggccgacggctcggaataccgcggcgactatcggctggcgcaggatgacttcattgccttccaccgcccgcgcctcgccgcgctggccgtcgccggcgtcgatctgctggcctgcgaaacgctgccgtcgttcgctgaactgcaggcgctgctgacgctgctgcaggagttcccgacgctcggcgcctggttcgccttcaccctgcgcgacagccaacacctcagcgacggcacgccgctgacggaggtcatgtccgcactgcgcggcaacccgcaggtgctggcgatcggcatcaactgcatcgcgctggacaaggtcgccccggcgctgcgtcagctgagcgcgctggccgacaaaccgctgctggtctacccgaactccggggagcattacgatgcggtgagcaaaacctggcacgcctgcggcggcgaacacggcagcctggccgatcaggcgacggagtggcgcgcgctcggcgcgcaattgatcggcggctgttgccgcaccaccccgcaggatattcgcgccatcgccgcgcgctgcaagaaatgagaaagggggttattcggttagccggcgtaaatgttcagcggcttgttcaacgttgaggcggccttgggctgcttcaaccgtaatttcgaccagttctgcgtcttcccgcagtgcaatgccattaataccgagaaatagcgccatgctttggaaggccgtgcgcttattgccatcaagaaaaatgtgaccgtggctgatggcgatgagatagagcgcggccaaacggtaaacgtcggtgacgttctcatagtggtaagcattgagcacgcggttggcggcagcctcaactttgttgccttcctggcggccgtgaggcacaatttcagcgttgaattccgcaatatcctctgcggtcaaaaagatcatctattagccagcgccttaatcgtatccgcgtgtttagcctgaatgcgcgctttcactttggctttgaccaaaacctcatagtcggccttactgatgatgtaaacctcatcgtgtccgcggcgcgtcacttccaccggctgtttttgcgcttccaaaagcacctcggccaaattgtttctcgccgccgtgtagctaatcgtagtcattttctttacctgtacatgtacatatttgacgattatttgtaccacgtccgctggaaataaaaaagcccccggcgccaacggcgcagggggccagtcactcatcccggccttacagcggttcggtctgggcttccaccaccgccagcgccaccatgttgacgatgcggcgcaccgaggcgatcggcgtcaggatgtgcaccggcttggcgacccccatcagcaccggcccgacggtcaccccttccgagcaggagacgcgcagcaggttgtagctgatgcgcgccgcttccatgttcggcatgatcagcaggttggccgagcctttcagcgggctgtccggcatcagatcgtgacggatgctttccaccagcgcggcgtcgccgtgcatttcaccgtcgatctccagctccggcgccagctcgttcaccagctccagcgttttacgcatcttgcgcgccgccgggcaatcagacgagccgaagctggagtgagacagcagcgccactttcggttcgatgccgaagcggcgcacggtttccgccgccatcagggtgatctccgccagctgttccggcgtcggatcgtcgttgacgtaggtgtcggcgataaaggtgttgccgctcggcagcagcaacgcgttcatcgcgccggcgacgtgcgcgccttcacggaagccgaacacgttcttcaccacgtcgtaatgctcgtggtagctgccgatggtgccgcagatcatcgcatccgcttcgccgcggtgcagcatgatggcggcgatcagcgtcgggttgccgatcaccgcgcggcgcgcctgctcttgcgagacgccgcggcgtttcatgatctggtagtactcgccccagtattcgttgaagcgcggatccgactcgttgttcaccacttcgaaatctttgcccggcgtcagctgcaggcccagctttttcaagcgcatctcgatcacgctcggccggccgaccaggatcgggaaggccagcccctgcgacaccagctcttgcgtggcgtgcagcacgcgctcttcctcgccttccgccagcaccacccgcttcatctctttgcgcgcctgcgagaagatcggtttcatgaacaggttggttttgtagacgaactccgccagcttctccacgtaggcgtcgaagtcttcgatcgggcgcgtcgccacgccggaatccatcgccgccttggccaccgccggcgcgatcttgacgatcagacgcggatcgaacggtttcggaatgatgtattccggcccgaaggagagatcctgatcgtcatacgcggaagccaccacgtcgctctgctccgccagcgccagatcggcgatggcgtgcacgcaggccagcttcatctcttcgttgatggtggtggcgcccacgtccaacgcgccgcggaaaatgaacgggaagcacaggacgttgttcacctggttcgggtagtcggaacggccggtacagatgatggcgtccgggcgcaccgctttggccagcggcggcagaatttccggttccgggttggccagcgccatgatcagcggatcgcgcgccatggttttcaccatatcctgcgtcaggacgcccgggccggagcagccgaggaagatgtcggcgttcgggatggcgtcgcccagcgtgcgctggccgttatcctcgatggcgtaggcggctttggtctgttccatattggcgtcgcggcctttatagatgacgcccttggagtcgcagacggtgatgttctgctgacgcagccccagcgccaccagcaggttcaggcaggcgatggacgccgcgccggcgccggacaccaccagccgcacatcggagatgttcttcttcaccacgcgcaggccgttgagcaccgcggcggtggtaatgatcgccgtgccgtgctggtcgtcgtggaacaccgggatcttcatgcgctcacgcagtttctgctcgatgtagaaacactccggcgccttgatgtcttccaggttgatgccgccgaaggtcggttccagcgcggcgataatgtcgattaacttgtcagggttatgctcatccacttcgatatcaaatacatcgataccggaaaacttcttgaacaaaacgcccttgccttccatcaccggcttaccggccaacgcgccgatattgcccagacccagtaccgccgtgccgttggaaatcaccgccaccagattgccgcgcgcggtgtatttgtaggccgccagcggatcttcggcgatctcgaggcaaggcgcggcgacgcccggcgaataggccagcgccagatcgcgctgggtcgccaacggtttggtaggggaaacctggatcttccctgggacaggaaactgatggaaatcaagggcactctgtttgagctgttcgtccattatggattcctttgttttttgcttttatgttgaggtaaggctttgaggctgcgccctgccgtgggccatggcgcccaattacaatgacagggcacagccttgaagtatagtgagagaaacatcacaaactttgaagcgcgccataaccttggtcgaaagagcgttttaaaagtaaaaaaagaaggcctgcgggacgagcagagaaacgccgccgtcagcgcggcggcagcgtggcgcgccaggcgttgagcgtctccacctggccggcgcaaatgtgtaacgaggtttgtaacgccagggcatagctcaccgcatcgccccaggtctccccctgcagcagcggctgctcacagggcgcgaacaccgactcagggggcaacagcggcacggcctgcggcgccggcggccgggcgcaggagctcaaacacagcgccaggcagaggccgagcggcgcagggatcgtttttaatcgcttcacggtatttcctctgataagcctcgtgttgctggcgcagctgctgttcctgccgctgctgcgccgccatcagcgcgcgattttgcgcgtcctgtgtctgcaaggtggcgataagccccgcctgctgcgccaggcttttttgcagttccgccgcctgttgccgcgcggacgccaactggtacgacaacagcgcgctgtagccgccgaggcagatagccgccagcaacagcagcagcaacccgccctgcatcagtttctgcagccagccgctcatgccggatagtcccgaaacggcagctggaagtgcgggccatccttgagggttttccattcaccgccccattcgacgttgatgccgcattcacgcgccgcgcgccgcaccgccactgcaatctgcgcgtagtaatcccactcccaggagaccacgcccgccggcatcgccaccacgtccaccgcgtgcccggtcaggtggcggctgcgcagcgtttggctgctgccggcgcgcaccatttcccgctggcgcgccatgctgcgcagcccctcgctgacggaaaacggcaccagcgaataacgcagcgccaggcgaataacgcgcaccagatccgggtgcacgccgcgcaggttttcttcgctgcgggcggtaaaacgaatctcttcaatgtcatttaacatttttaaaccccgtctttttgccgatgaattttttaattaaggcgttgatgtaatccgcccccataaaaccaatcaggacgctggccaaattcgcccactttaattccaggcccatcaacgccagcgcatcgcgcaccgtccaggccaataacgcgcacatcgccgcattcaataagcgtcgccgaatgcccacgttgcggtaggcgccatgtaatagcgccatcacgccggccaaaatggcgttcaataccggctgaagatattcacatactcgctggactattaagccaacagcgtcaggctctatgctggacatagctcatctccttttttatttttaattaaatgccaatcacggccggtggaacatcggataatcaaaatctagttaaggatgctattacaaagcaaatgaataaatacaggccctatggtcgaattcattcacgctgaacgttggcacaacacataaacgccaagacaggcggcagtaaataaaaaattcattcttatggtgatttatttcgacttttgtttttacgaaaaataaacattaatggcggtggggaatacttccccatcataaaaacatccactctggagaaataccatgtccacacgcaaagccgttattgggtattattttattccaaccaaccaaatcaataattacaccgagtccgatacctatgtcgtgccattcccggtttccaacattacgccggccaaagccaaacagctgacgcacatcaacttctcgttcctggatatcaacagcaacctggaatgcgcctgggatccggccaccaacgacgccaaggcgcgcgatgtggtcaaccgtttgaccgcgctcaaagcgcataaccccagcctgcgcatcatgttctccatcggcggctggtactactccaacgatctgggcgtgtcgcacgccaactacgtcaacgcggtgaaaaccccggcgtcgcgcgccaagttcgcccaatcctgcgtgcgcatcatgaaggattacggtttcgacggcgtggacatcgactgggagtatccgcaggcggcggaagtggacggcttcatcgccgcgctgcaggagatccgcaccttgctgaatcagcaaaccgtcgccgacggccgccaggcgttgccgtaccagttgaccatcgccggcgccggcggcgccttcttcctgtcgcgctattacagcaagctggcgcagatcgtcgcgccgctcgattacatcaacctgatgacctacgatctggccggcccctgggagaaggtaaccaaccaccaggcggcgctgttcggcgacgcggccgggccgaccttctacaacgcgctgcgcgaagccaatctgggctggagctgggaagagctgacccgcgccttccccagcccgttcagcctgacggtcgacgccgccgtgcagcaacacctgatgatggaaggcgtgccgagcgccaaaatcgtcatgggcgtgcccttctatggccgcgccttcaagggcgtcagcggcagcaacggtgggcaatacagcagccacagcacgccgggcgaagatccgtatccgagcaccgactactggctggtgggctgcgaagagtgcgtgcgcgacaaggatccgcgcatcgcctcctatcgccagttggagcagatgctgcagggcaactacggctatcagcggttgtggaacgacaagactaaaaccccttatctgtatcatgcgcagaacgggctgttcgtcacctatgacgatgccgagagtttcaaatacaaagcgaagtacatcaagcagcagcagctgggcggcgtgatgttctggcatctggggcaagacaaccgcaacggcgatctgctggcctcgctggatcgctatttcaacgccgcagactacgacgacagccagctggatatgggcaccgggctgcgctacaccggcgtcggccccggcaacctgcctatcatgaccgcgccggcctatgtgccgggcaccacttacgcgcagggcgcgctggtgtcctaccagggctacgtctggcagaccaagtggggttacatcacctctgcaccgggttcagacagcgcctggctgaaggtgggccgcgtagcgtaaaccataaaaaaaccccgtagccgaatgctgcggggttttcattgagttaaccgtttgattttcgcgtcccttcgtctctattccttcagttgtggcaccatggatagccgccatcccgcaccacttcgcggcccatcaggctgtagacatcgcttttacgcgtcagccgctcatgccaccagttaaacccggcgcccttgctggccggatgccacgccagccaaatcatttcgtcgcccttttgcatctccaccggcaccgtcaccagttcgccgctggccagttctttttcgatcagcgcaggcggcagaaaagcgtggccgatgccgcgcttgagcagcgccaggttgctttccacatcgcacaccaccagttgacgctgcaagggcagcgtaccgtgattgcgcttgggcagctcatggctgctgtcggcgatcaccaccacgatgtcgttcaaccgctgtttcttgcacaccggctttctctgcgccgcgaacgggtgcgaaggcgatacgcacagcacaaagttgagcttgccgagcatcagggttttggcctgcacgctgtcgggaatttggccgatggcgatgatcagatccgcccggttgtttttcagcgcatcccaggtgccgttcaacgcttcccgctgcaccgagatattggcgttcgggcaatgctgaatatagtcgcggatatcctgcgtcagcgtttccagcgggaagaaggtgtctaccgccaggcggatattattgtccagcttggggatgttgcgcacccggctttccagatcctgcaccgcatttaaaatccaactgccttcctgcaggagaaattccccttcatccgtcagggtaatcatggggccattgcgatgaaaaagtttcacgcaaagtttgctttcaatattggaaacccgataagagatcgccgaaggcgttttatgcagcgcctccgcggccatagagaaagatccggtgctcttgatggtgctgattattttaatcgcgtccagggataatctagtcatacaaattcctctttaaaataaaataagaaaaatgacactaaattcccaaggtggtggcgcacaaaaatcgatcaaatcgaacaagggtactcatagcaacaagcaatatacttcataaatgagagcgctatcttaaatactattcatcactacttgatataaatttcatcatagcgccgtgcttttacactgtgacagttaaataaattcggcctaacgatcaaagattgtcatcataatatttttcgttaatagccggtaaaacattccgatctacggccaaaccagaatggtaaaaataaaacaagccgacagaaatggttatttccaattgcgttattagtctctcattttgtcggtgaaatacgctcaacttacaacataatttcagtcaggagtgacttatgaacaaaacttcccgtaccctgctctctctgggcctgctgagcgcggccatgttcggcgtttcacaacaggcgaatgctcacggttatgtcgaatcgccggccagccgcgcctaccagtgcaaactgcagctcaacacgcagtgcggcagcgtgcagtacgaaccgcagagcgtcgaaggcctgaaaggcttcccgcaggccggcccggctgacggccatatcgccagcgccgacaagtccaccttcttcgaactggatcagcaaacgccgacgcgctggaacaagctcaatctgaaaaccggcccgaactcctttacctggaagctgaccgcccgtcacagcaccaccagctggcgctatttcatcaccaagccgaactgggacgcttcgcagccgctgacccgcgcttcctttgacctgacgccgttctgccagttcaacgacggcggtgccatccctgcagcacaggtcacccaccagtgcaacataccggcagatcgcagcggttcgcacgtgatccttgccgtgtgggacatagccgacaccgctaacgccttctatcaggcgatcgacgtcaacctgagcaaataatcggccaaatgaggagatcgttgagggttcagcctggcgctgaacccttttttgcaggtgccgctattgcgacatgttgaggatagtgcgcacattgagcgcgctggtggcgataatgtcgatggcgccggtgcgcaaagcgcccaaaatcgccaacgccttggtattctcggaagcaatggcgatcacacaagggattttgcgcagctcatcaatgctcagcccgatcactctgtcattcatcaccgtgtcgacatgctggccctgagcattgaaaaaatcatagccggcgatgtcgccgatcacgccctgattaaggctggcgtcgataatctcgtgcggcgtaaaccaccccaatttcaccatatagctgttttcattcatgtcgccaatgccgactaacgccacatcggccttacgcgcacgatccagcgtttccttgatcgtgccgttctgcatgaaggcgtctttcagcgcgcgattttcgacgtaggccggcgcatagagcgtctcgctgctgccgccgaacttcttcgccagacgccggctgatatggtcggcgttgatcgcgtcgcccggacggtgggtgccgccgatgccgcagatgaacttgcagttgcgttccgtcacgctgccgacatgatcggcgatcgccgccacgttgcgtccctggccgaccgccaacaccatatcgtctttcagcgacatcgccagataattggacaccagcgccgccacctgccgacgctgttcctcttcgtcctgatggtcgagcgcgatcaacgcgcggctgatgggaaaacgttccatcatctgctgttccagccgggtgctgaataccgggtgataacgcacgttgatctcgacgatgccttcttccttggcgcgcttgagcaaacgaccgactttgatccgtgagatgccgaactttttagcgatctcttcctgcgtgatctcatcctgataataagcaacggcgatttcggtcagcagttcgttatcctgggacacagtttgtttttccatccgttagacgtttccccacggcaggccggttgatgatggcggagggacgatacacgcccctccgacaaggctgaatgcccgctagtataacgcgttcaggcggcaacggtattcagtcgttgctccacctcgtccgccaatcgggtcaagagcaggcagcaagataccgcgccggcgtccagtacgccgcgcgaacgctcgcccagacggctggcgcggccgattttcgccaccagctcgcgggtggagtcccgcccgcgctctgcggcgattttcatttgttccagcgcagcggcgaagtcgtcaccgcgtcccaccgcctgctcaaatgccgccaccgccggtatcagcgtatccatcagacacttatcgcccacgcccgcgctgctgatgtcctgcagttcgcgcaacccgccgtgcaacatcgccaaaaatgcctgcttgtccagcacgctgcgctcacggacgctctccgccatgcccatgaacaggctgccgtacagcggccccatcgaaccgccgatgccctccatcagcgcatccgataccgcatcgaacgcctgcgccagcgtgagctcgcggccgcgaatggcatcgccgcacatcgcgaatcccttcgacatattaatgccgtggtcaccgtcgccgatggcgccgtcgatttcgctcagatattcgcggttgctgacaatggtttctatcagccccgtaacgatctcactgccgtaccgggttgaaatttgttccgtcatgattcactccacctgggttaagcctaaagattgcgccggcatgtccagcagcgttttcagttcgtcatccagcgtcatcagcgtcagcgtcacgcccatcatttccagcgacgtgaagtaattgccgacgtagcgccgatgcacccgcacgcctttcgccgtcaaccgacgctctatttcggcataatagatatacagctccatcaccggcgtggcgccaagcccggagatcagcagcgccacctcctgcccctgttccagcggcatgtcgttgagcacgaaatcgagcatggtgccggccatcgccgacgccgactggatcggcgatacctcaatgcccggttcgccgtgatggccgatgccgatctccatcttgccgtcttcgatatgaaaattgggtttgccgaccgcgggaatggtgcaggaactgaggccgacgccgatcgaacgacaccggtcgatggccttttgcgccgcgccgatcacgccgtccagatcgtatcccttggccgccgccgccgcgccgaccttccacatcagaatttcgccggccacgccgcgccgtttatcgatctcactggccggcgccgaggcgacgtcatcgttggccaccacggttttcacccgtatgccggccgccgtggccttcttgatcgccatcttgacgttcatgttgtcgccggcgtagttgccgtacaggcaagcgacgcccgcaccgctgtccgccgccttgaacgcgtcgagaaaagcccccgccgtaggcgatgaaaaaatctcgccaatcgcgacggcatccagcatgtttttaccgacatagcccaggaacgccggctcatggccggaaccgccgccggtgacgatgcccactttgccggcgatcggcgccggcggatatttcaacacccgcgcattgtcggtggcggcgtaatagtccgggtgggccagcctgtagccctgaatggcgtcttccactacgtgatcgggatcgttaatgattctgttcatcgcggcctctctgtcgcctgaataagaaattattgaatggtgtaaccgccgtcgaccaccaggttggcgccggtgatcatcgccgccgcgtcaccggccaaaaacagggcgctggcggcgatatcttgcggctcagcaaagcgccgcagcggaattttctgcttcatctgctcagccacctcgcctgaccaggccttacggcccagctccgtcaaaaccacggtgggtgaaatggcgttgacccgcacgttgtgtggcccccactccagcgccaacacctgggtcagaccgattacgcccgccttgctggcgcaataggctaagtgattcggcaatgccaccaccccggcctgcgaggagagattgatgatgctgccgccgcgctggcgaatgaaacggcggcccaccgcctggcaggtgagaaacacgcctttcagattgaccgccagggttgcatcccacgccgtttccggcagctcctcggccggatgcagcgcgacgatgccggcgctgttgaccagcacgtccagccgcccgaaatgcgcctcaatctgcgccaccgcccgctccaccgatgcggcatcggtgacgtcggccacgacgcccaccgccgcctcggcgtccagctgtcgcgccacttccgcaacttgcggcgcccgatcgagcagcgccacgcgcgcgccgttttgcagatagcgttcggcaatagcgagaccgatccccgcagcgccgccggtaatcagcgccaccttgccctgcagcgagagctcgcgcggcgccgtagtttgatgattaatcataaatttccccttaaaactgtgaacttcaccctcggtcaggatattttcgccaaactcgcgccgcgttcttcctgcgccgtcgcgctttctttcggcagcgtgacaaatttcatcagcacaccgctgaacaggtacaaaccggtaaagatccagatcacgccaacggtgccgaggctgccgataaacagccccaccaccgccgggccgacaaaggtgctcaggccggcccccagattgagaatcgacatcgccgcccccttattgtccggcgccagcgacggcatgatggccgacagcggcacgaacgccgccaggcaggcgccgaacaacccggcggcgcaaacggtcaacaggtagttggcgccgaagaattgcggcacgtagtagaacatcagcgtggtcaaggcacagccgacgcagccaaaccacatcaccacattgcgccagccgagcccgtcgctgatcacgccgaaaatcaggttgaaaatgatgttgaccgtccacagcgcggcgtacatctgcaaccaatgcgtgcgggtgaaccccatatccatcatgtacatgggcatgaatacgacgaagccgtaagccgcagaggtattaatggtgcgcacgatgccgcccaggccaatcttcgggttttcaaacgcgatggtgatgcccttcaagacataacccagcgacgctttttcccggttgccgctctgtgccgcgccgtcgtcgcgattgagcatcagcgcaatcaccgcgcccagcacgacgaaaatcagcgcgctccacagcgtgtggatctcgccgagataaggcagcatgatgctggaatacagcacgcccagcacgctgagcccgccgctgtagacgaaccagaaaatccccaccgccgaccccagcctttccggcggcgcctcatacgccacccacaccagaaaaccgtaggcgaacaacggataacccaagccgcgcagcgcataggtcggcaccatgatcgccaggttgttgctcggcaggccgaacgtcaaaaaacacaccgaaccgaacagaaacagcagcaggccggccaacatcacccgccgggcggtaaagatttccgccaacacgccggaaaaccaggcggcgatggcggccgcaaagccataaacgctgaacagcagcgccgattcctgaatgctcagccctttgccaatcaaatacggcgacagccagccctgttccagcccttcgcccatcatgaacaccaacacgccggcatagcccagcagcagtttcggtgacagaccaatgcgatgaatcagtccatgcaacatagaacaccccagcacatgtgattatggaggcgcaggctcgcccgcacccgaggaacgacgcaggtttcagaggtttggattaagcaccactttgattgaaccgataccgcgcttcatcagctcgaaaccttcggcgaactgttccagcggcaacgtatgcgtcaccacgccttcggtcggcagatcgccattggcgatgccttcgatcaccagcggatagcagtaagggccgaggtgcgaaccgagcacgtccagttccttgcggtcgctgatgatgctccagtcgacggtcaccggatccttaaacacggaaaattccacgaaggtgccgagcttgcggatcagcgtcaggccctgttccacggacttctgtgcgccggtcgcctcgatgtagatgtcgcagccgtagccctcggtcatcgctttaaccgcggcgggcacgtcgtcacgggtgggattgagcgtcacatccgcgccgaagcgcttcgccaaggccagacgttcgtcggacagatccagcaccaccagcttcgagggcccggatttcttgatggccccgatcatgcccagccccagggtgccggcgccggccaacaccaccacatcgcccagtttgatattggcgcgttgcaccgcatggaaggagcaagcatagggttcgatcagaatggctttttcgatcggcaggtcggccggcacatgatagttaatcgcctctttggtgaacttcatgtactcggccatgccgccgttaacgtttttctggaaaccgtacaggtcatgcttttcgcacatccaatactgaccgcggttgcagaagcggcattgccagcagggaacgatttgttctgatatcacgcgatcgccgagattgaagccctcgacgccttcaccgtaccccacgacatggccgataaattcatggccggggatcatcggcgccttgatgtacgccggttgtttttcatcgccccagaagctgggcgccccttcgaacgctttaacatcaccggcgcagatgccgcaggcttcgatcttcaccaggatctctttcgggccgatcttcggtaccggcacctgttccaggcggtaatctttcggggcgtacgccacaaccgccttcatgatctcggggataccggccgccattttcgcctctgttatgcaggtctgacacatagcactctcctctggtagggaaacttcttttgatcattaacacaaacaaagaacaaatgaacactaacgctatgcgttcaatttgcccacagtgaacttatcaaagtgtgatatcgctcaaaaacccgtctccactagagtgaacaacgattaaaagcccttttttagtgactaagatcaccttttacagtggcaaactgaaaagccaggcaaaaaacaaaagaacacagattgaacatttgattaaacagggatacggtaatgaacgtggcgccaccgaggatcgccacccttttcgttaccaatcaggagatcgctatgctgcctatcgccatcggcgccgatgatgccgccattgaactgaaagatctgatcgttgcccacctgcaacaacgggacatccccgtcattgactacacgacggatcgcgccgcagaaacggggatctatcccgatatcgcctatcgcgtcgcgcaggcgatacgggaggaaaaacatcagcggggcatcctgctgtgcggcaccggcatcggtatgagcatcgtggccaataaagtgcccggcattcgtgcggcgcaatgtcacgatacctactccgcccagcgggcgcgcaaaagcaatgatgctcagatcatcacgctgggcgcgcgggtcatcggcgccgaactggcgaaaaccatcgtcgatgcctggctggaatcggagtttgaagggggaggatcggcgccgaaagtcgagcggatcggctattacgaaaacgcggccggacggcgttaaaccgcctgccgtctcgatggcggtcgcgcgcaagccgcgctccgcctgggtttattcggcattcattgttattatccatcgcaacaatcagaaaaagcgcattttcattctcgatccgatgatgcagtgtgttccccctatgatgaaaaaggttctcatttccctacattgagcttggtcaaggagcttatcaatgaatcaattagacgcactcaagcagctgaccacggtggtcgccgacagcggcgatatcgaatccatccgccagttcgaaccccaggacgccaccaccaacccttcgctgatcctgaaagccgccgcgctgccgcagtacaaggcgctgatcaccgaagcgttggagtatgcccgccgccagggcggcagcaaggaaacccagctgatcaacgccagcgataagctggcggtcaatatcggcgtcgagatcctcaaaagcgtgccgggccgcatctccaccgaagtggacgcccgcctgtcgttcgaccgcggcatgtgcgtcgccaaagcgcgcaagctgatcgccatgtaccaagaacaaggcatcgacaaatcgcgcatcctgatcaaactggcttccacctgggaaggcatcaaagccgccgaagagctggaaaaagaaggcatcaacaccaacctgacgctgctgttctccttcgcccaggcccgcgcctgcgccgaagccggcgtgtatctgatctcgccgttcgtcggccgcatctatgactggtaccaggccaaacagcctgccgccgactacgacgccgatcaggatccgggcgtgaaatcggtgcgcaccatctatgaatactacaagcgtcatcgttaccagacggtgatcatgggcgccagcttccgcaaggttgagcagatcctggcgctggccggctgcgatcgcctgaccatcgcgccaaacctgctggaacagctgaaaaacagcgagcagccggtcgaacgcaagttgaccccgtctaccgagggcttccaccaaccggctccgctggccgaagcggagttccgctggctgcacaaccaggacgccatggcggtggaaaaactcgccgaaggcattcgcctgttcgccgtcgaccagcagaagctggaagacatgttggccgctcaactgtaatcgcactggagtttcgttatgtcttctcgtaaagagcttgccaacgccatccgcgcactcagcatggacgccgtacaaaaagcaaattccggccacccgggggcccctatgggcatggcggacatcgccgaagtcctgtggcgtgactacctcaaccacaacccgactaacccgcactgggctgaccgcgaccgtttcgtgctctccaacggccacggctccatgttgatttacagcctcctgcacctcaccggctacgacctgccgatgcgcgagctggaaaacttccgtcagctgcattccaaaaccccgggccacccggagtacggctacaccccgggcgttgaaaccaccaccggcccgctgggccagggcatcgcctacgccgtcggcttcgccatcgccgaacgcaccctggcggcgcagttcaaccgccccggccatgacatcgtcgaccaccacacctacgccttcatgggcgacggctgcatgatggaaggcatctcgcacgaagtctgctctctggccggcaccctcaagctcggcaagctgaccgctttctacgatgacaacggcatctccatcgacggccacgtcgacggctggttcaccgacgacaccgccctgcgcttcgaagcctacggttggcacgtggtgcgcaacgtcgacggccacaacccggacgccatcaaggcggcgattgaagaagcccgccaggtgaccgacaagccgtcgctgctgatgtgcaagaccgttatcggctttggttcgccgaacaaggccggcacccatgacgtgcacggcgccgcgctgggcgccgccgaagtggccgccacccgcgaagcgctgggctggaaatacgccgcctttgaaatcccgcaggacatctacgcccagtgggacgccaaagaagccggtcaggccaaggaagcggcctggaacgacaagttcgccgcctacgccagggccttcccggaactggccgccgagttcaagcgccgcatgaacggcgagctgccggccgactggaaagccgacgccaaggcgttcgtggaaaaactgcaggccaacccggccaacatcgccagccgcaaggcgtcgcagaacgcgctggaagcgttcggcaaggtgctgccggagttcctgggcggctccgccgacctggcgccgagcaacctgaccatgtggtccggctcgaaagcgctgaacgttgacccggcgggcaattacattcattacggcgtgcgcgagttcggcatgaccgccatcaccaacggcatcgcgctgcacggcggcttcctgccgtactcggcgaccttcctgatgttcgtggaatacgcccgcaacgcggtgcgcatggcggcgctgatgaagctgcgcaatgtgttcgtctacacccacgactccatcggtctgggcgaagacggcccgacccaccagccggtggagcagctggcgagcctgcgcgtgaccccgaacatgagcacctggcgcccgtgcgaccaggtggaatcggcggtggcgtggcagtagggcatcgagcgtaacgacggcccgaccaccatggtgttctcgcgccagaacctgacacagcagccgcgcaccgcagagcagctggcgaacgtgtaccgcggcggctacgtgctgaaagactgcgcgggcacgccggacgttatcctgattgccaccggctccgaagtgggcatcacggtggaagcggcggacaaactgaccgcggcgggccgcaaggtgcgcgtggtgtcgatgccgtcgaccgacgcgttcgacaagcaggatgcggcgtaccgtgagtcggtgctgccggcggcggtgacggcacgtgtggcggtggaagcgggtatcgcggactactggtacaagtacgtggggctgaacggcgccatcgtgggcatgaccaccttcggtgagtcggcgccggcggagcagctgttcgccgagttcggcttcaccgtggacaacgtggtggccaaggcgcaggcgctgctgaagtaagcggtctggcgcaagccgataaaaaagccggtcatcatgaccggctttttttattccatcacccgatgaatctgcaaatactgcagtagcatgatggttttgccgtctttaatccggccatcggcgatcatcgccaccgcgtcgcgaaacggcagttcgatcacttcgatatcttcatcttcaatgccgccgccggccgcgcgccgctcatcgtcatggtattcggcgataaagaagtgcacgatctcggtcacgccgcccggcgacatgtaggcttcgaagatttttttgacctcgcccacctgaaaaccggtctcttccaccgcttcgcggcgcgcgcactgctccggcgaatcggcgtccagcaggccggcgcaggcctcgagcagcatgccgctttcgttgccgttgacataggtcggcatgcggaactggttggtcaacaccaccgtgcccttggcgcggttgtacagcaaaatggtggcgccgttgccgcgatcgtaaacctcgcgcatctgttgcaccgaaccgccatttttgcgtttcagatcaaacgtgtacttgtgcagcacataccagttgtccgataacagctctttcttcacattctcaattttcgacgacatgaccctttttccttgagttgcaacgtgaaaatcataccgcgattacgctgcgccgcagcagacgatttgcaacaaaaatcacaacgcctctccgggcaaaccaggattaaaaatacatcgtgggcggacgcataatctgacagacgaattgcatccgcaaagacaaatcctcagtggaaaccgagctgcggctgaacatcggcgggcatttcgctattcatttgattacacgacgacaattgttcccgttttgttgacaacttgatacaaatcgcggtgcaatttagttgcaaaagttatagttttgctttcgaatgaaactggcgcagccctcacctaagagaaaaggattccgtgattgcttgttaaacgttccgtgaccggcagcctggccagggcgctgttcggcatcgtgatactgtcggtgctcgccaccgggttggcgttgacgaccgtcgccggcagccagagcgatgccgaggcgatcaacattgccggttcgctgcgcatgcaaagctaccgcctggcctttgatctcgatcgacagagcccggagctggagctgcacctgcagcagtaccgacaatctttgcaggcgccggcgctgcaaaagctggcgcgcttttacgtcccggccgaggtgcgcaaccactatctggcgctgcaacgaacatggcaagcgatggagcggcagatccgtgacgggcaagcggccgcctaccgggcggaggtcgccggctacgtcaaccgtgtcgatcattttgtttccgctctgcagcgttattccgagttgaaactcaccctggtggccgccgtcagcgtgctgggctacgccgccatcatcggtctggtgctgttttgcatccgctttatgcgccgccaggtggtcatgccgctgcagcatctggtcgacgccagccagcgcgtgcaacagcgcgactttcgccacccgcagctggacgtggcgctgccgaacgagctcggcgtgctgtcgcaaaccttcagcgccatgtctgacgagctggcccggctctatcagtcgctggagctgaaagtgcaggaaaaaacccagcgcctgcagcaggccaacgaaacgctggaggtgctgtatcgctgttcacaggcgctgagcgtgcgccagatcgatcagcaggcattcgagaatgtgctgcgcatcgtgcgccaaagcgaacgactgcgctgcatccggttgaacgtggcggacgatcatggccagtggcaactgaacgaaggagagccggcgccggcgcaaacctggagcgcgctgccgatcacccaaggcgataaactgctgggtgaattgcgatggcagcccgaagcgcagccgccgcatcctcacctgatgcagagcctggccaacatgctggggcgtggcgtctacttcaaccgggcgcaaaagcagcaccaatatctgctgttgatggaagaacgtgggaccatcgcccgcgagctgcacgattcgctggcgcagacgctgtcgttcctacgcatccagctgacgctgctccggcgcgccgccgacgatccggcggcgcagacgattatcgacgatttcgatcgcacgctggccgatgcctatcgccagctgagagaattactggccaccttccgcctcaacattcaggaggcggatctgaatgccgcgctggagcaactgctgcagccattaaaggcgctaaccaccgcgcggattcagttacactgtcggctgccctcgcaggcgctcaacgcccagcagcaggtgcacgcgctgcagatcgtgcgcgaggcggtgctcaatgccgtcaagcacgcaggagcgagcgagatcgcggtgtgttgcgaggtcaacgccgcaggcgacaacgtattcagcattaccgacgacggttgcggtatcgccagtctggaagaaccggaagggcattacggcttgaccatcatgagcgaacgcgcggcgcgactgggaggaacgctgcgcatccggcgcagaagccgcggcggcacggcggtctgcctgacattctcgccctgaccttgcggctgttcactctgcgttacggttgccgccgggcagaaggccgcccggagaggtttgcggtgcagaatgccgctatttttgaagagacagtcccactgtgaagcacgcctccgggcgcgtttgagtggctttacttgctacagggagcatatttcatggtgatgaagcaataccgagtcatgatcgttgacgatcatccgttgatgcggcgcggcatcaaacaactgctgggactggatgcgcgatttggcgtggtggcagaggccggcaacggcagcgaggctgttgcgctggcgctgcagcacgcgccggacgtgatcttgttggatctgaacatgaagggcatgtccgggctggatacgctgcaggctctgcgcgacgaaggcgtggacgcacgcatcatcgtgctgacggtctccgacgcgcgcagcgatctgtatgcgctgatcgacgccggcgccgacggttatctgctgaaagacagtgaaccggagcagctgctggaacacatcagcgccgccgccgaggggcaaaacgtgatcagcgacgccatggccgactatttgctggcgcgcagcgagcagcgcgatcccttcaccgccttgaccgaacgcgaactggacgtcttgcaagaggtggcgcgcggcctgtccaacaaacaggtggcggcgcaattgcatatctctgaagaaaccgtgaaggtgcacatccgcaacatactgcgcaagctggacgtgcgttctcgcgtggcggcgacggtgatgtacctggagtacaaaagccactgatcgccccgccccggccaatacgccggggccgcttactcgatggcgctgagcagcgcctgatggtgctgatgcacccaactcttgttgaacggcccccagctttccaactgataaaaaccgtcgttgttgcgcacgccctgctgcacgaactgcagctcgacgcccatgccgggcagcgccttcagcacatcctgcaacgtgcggcgcggccagccggtcagcgccatcaaccgcggcacattgggccgctcactgtggctgatcagccagcataaataaagccgacgggcaaataccgggttaattcccatgccaagctcctgctgtaaggtggatccagtttttatttttcggctccctgcggcgaagacatgcgcaaggcctttgatagtaataaaaatgtcttaatagcgtacaattatcgacaccggggcacccacgccgtttcccgctaccgttatttacactatctcctttttttctccacgctttcctcgactatcccgagtaaagtgcaatagcgccggaatccttccctgccgctgaaatgcatatttccgatgcgttttaaagatagaacaagtcataacgaggttcgcgctgcatggccaatttttttattgatcgcccgattttcgcctgggtgctggcaattattctttgcctgaccggggcattggcgattttttctttaccggtagaacaatacccgaatttggcgccgccgaacgtgcgcatcagcgcaacttatccaggcgcctcggcgcaaacgctggaaaacaccgtcacgcagatcattgagcaaaatatgaccggcctcgacaacatgatgtatatgtcgtcgcagagcaccaataccggccaggcgaccgtcacgctgacgttcgaagccggcaccgatcccaacgaggcgatgcagcaggtgcaaaaccagctgcaggcggcgatcaaacgtttgccgcaggcggtgcagaatcaaggggtcacggtctcgaaatccggcgacactacgctgatgatggtggcgttcgtctccaccgacaacagcatggacaagcaggacatcgccgattacatcgtctccaacctgcaggatccgctcagccgcatcaacggcgtcggcagcatggacgtgtatggctcacaatacgccatgcgcatctggctcgatcccaacaagctcaacagctatcagctcacgacccaggacgtggtcaaggccattcagtcgcagaacgcccaggtggcggtcggccagttgggcggcacgccgtcggtcgataaacaggcgctgaacgccaccatcaacgcccagtcgcagctccagacgccggaacagttccgccagatcaccctgcgggtcaatcaggacggttcgctggtgacgctgggcaacgtcgccaccgttgagttgggcggcgagaactacaactacctcagccgctacaacggcatgcaggccgccggcatgaacatcaagctggcctccggcgccaacgaactgcagaccgaccagttggtgaaggacaagatcgccgagctgtcacaatacttcccgcacgggctggaggccaaagtggcctatgaaaccaccccgttcgtcaaagcttcgatcaaggacgtggtgaaaacgctgctggaggccatcctgctggtgttcctggtgatgtatctgttcctgcagaacttccgcgccacgctgatccccaccatcgccgtgccggtggtgctgatgggcaccttcgccatcctttccgcctgcggcttcagcatcaacaccctcaccatgttcgccatggtgctggcgatcggcctgctggtggacgacgccatcgtggtggtggagaacgtcgagcgcgtgatgagcgaggaaggcttgccgccgcgagaggccacgcgcaaatccatggggcagatccagagcgcgctggtcggcatcgccctggtgctgtcggcggtgttcgtgccgatggcgttcttcggcggcaccaccggcgccatctatcgccagttctccatcaccatcgtctccgccatggtgctgtcggtgctggtggcgatgatcctgaccccggccctgtgcgcgacgctgcttaaaccgatcgccaaagggcaccatcacggcaagcgcggcttcttcggctggttcaaccgcatgttcaaccgcaatgccgatcgctatgagcgcggcgtggggcgcattctgcacgccagcggccgctacatggtgatttatctgctgttgctcggcggcatggcgctgctgttcatcaagctgccgacctcgttcctgccgcaggaagaccgcggcatcttcaccgtacaggtgcagttgccggcgggctcgaccctgcagcaaacctccaaagtggtggaaaaggtcgagcggtacttcctcaccgaagagaaacaggacgttttgtcggtgttcgccatcatcggctccgggcccggcggcaacggccaaaacgtggcgcgcctgttcgtgcggctgaaagactgggatctgcgcacctcgggtgccaacagctcgttcgacatcatcgatcgcgccacgctggcattcaacaagattaacgaagcccgggtgatcgccagcagcccgccggcgatcaccggtctcggcaactcctccggcttcgacatggagttggaagaccacgccgggctcggccacgccaaactgatggcggcgcgcgatcagctgctgcagctggcggcgcaaaacccgctgctgtcgcgcgtgcgccacaacggcctggacgacagcccgcagctgcaaatcgatatcgatcagcgcaaggctcaggcgctgggcgtatcgatcgacgacatcaacaataccctctccaccgcctggggctcgacctacgtcaacgacttcgtcgaccgcgggcgggtgaaaaaagtctacgtgcaggccgcagcgccgttccgcatgctgccggatgacatcaacaaatggtatgtgcgcaacagcgcgggcggcatggtgccgttctcggccttcgccagctcgcactgggagtacggttcgccacggctggagcgctataacggcagttcggcgctggagatcgtcggcgaggcggccaacggcgtcagcaccggcaccgccatggcggaaatggaaaaactggtcagccaactgccgaccggtttcgggctggaatggacggcgatgtcctatcaggaacggctgtccggctcgcaggcaccggcgttgtatgccatctcgctgctggtggtgttcctgtgcctggcggcgctgtacgaaagctggtcgataccgttctcggtgatgctggtggtgccgctgggggtgatcggcgcggtcgccgccacctggctgcgcggcctggagaacgacgtctatttccaggtcggcctgttgaccatcattgggctgtcggcgaaaaacgccattctgatcgtcgagttcgccaatgagctgaaccataaagggcaggatctgatgtcggcgacgctcgacgcgtcccgcatgcgcctgcggccgatcctgatgacctcgctggcgttcatcttcggcgtgctgccgatggctaccagcagcggcgccggttccggcagccagcatgcggtcggcaccggggtgatgggcggcatgatctccgccaccctgctggcgattttcttcgtgccattgttctttgtgctggttcgccgccgtttcccgggtaaagcgcatccggcaggcaatacgccggccaccggggactgatccgcgagatataaaaaaagcagcgtcgggttaccgatgctgctttatttcgaacgaaaatctcgttcccaaggtgtttcagtgactttccaatgactcaaccttgccatctgcttcaacgctgtgtcagttgcccaacatctcatcaatgaagtctttccagtttcctaattcacgatcaaccataatactttacaacctcaattatttgacgaagcggattctacgcctgttttttgaccatgtgaagggaaacgggaacgatgccgggctcggaaaccgggcttagcgcacattttcgtatttatctgatcaatgttcagtgcagctattcccttgtgatatcaatttctccacgatagcgtgtaaaaggtataaaaatacgccaatggagcccagatcatgtccacttctttgtctctcttagagttaaaaacgcagggccgctatcaggaggcgaccgcgctggcgctaaggcaactggcggcagagccggaagcggcaacgctgcactttcagctggcctgcctgtatgacgtacagggcctggagcaacaggccattccctgttacctcgcggcgttggctcgcgatttgccgcccgcccaacgccgcgaggcctggctgggtctcggcagcacctaccgcgccctgggagaatattcggcgtcgctacgggctttcgacgacggcctggccgagttcccgcaggccaacgagctgatgctgtttcgcgccatggcgctgtacaacctgggtgaaaataaacgggccgtgaccgatctgttgctgctgctggcggaaacctcgtcagaccccgacatccgcggttatcaacgcgccattcggcactatgccgccgatctcagtcttatcggttagaggaaaacgatggaaattatcaccgactcgagtcgccgcgccatcgactggcagcggctgtgtgaattgctggaggccgccgggctgggcaagcgcgatccgcacaccttgcggcgcgtttaccaacacagccagttttgctattgggggtttatcggcgacgagttgatcgccactgcacatgccatcagcgatctgacatcggtcgcttacctggcggacgtggcgatcgatccgcgctttcagggacaagggctggggcgcaggttgatggatcgggtgatgcaagatctggcgccgctcggcaagattttcatctattccgtgccggaaaagctcgccttctataaaaagtacggctttcacgatttgaccaccggcatggtgtatgcggacggcgctgcgctgcagcgcctgcaacaagggggctacgtgcgttaaatgtgcatcacaaggttttgctcataaagatacggcgggttcccggcggcaagcaaggcacttcacccatacgctgccagccatgccgttgataaaagtccggcgcctgaaagctgatggtgtacaacacggcggaaaggcaaccgcgccgacggccttcctgttcgaagcggcgcaacagttcgctgcccaaccccgcgccgcgcagcgcttccggcagataaaagagatcgagaaacagcagccctaacgatgagcgtccggtaatccctcccagaacttccccactgtcgggatctcttaccaccaccgccagcggcagacgatcgccgtagccgatatgttgatcgttaaaacggtccaatccctccgcgatacaggacgttatttcctgcgttacccgctcggaaatttcgatatgacattttttcacgccggctctccggatcaatcatccatgttcacactctgattacagcttaaaacatcgcagtttctttgtttagaattatctttgtctcaatttcaacgttaattttttcatgacctcatcgccgactctggtgacgttcaaaataaagccactcatcgtgacaaaaccaagaaaaatcttagttattaattcgttaagcccaaacagccacccttaaatgatcgtcaaaaccgatcattttacatattttgatagtcttaatctatgttaattccttttaattaccgaggtattaatagaagatgtctattctattaaccttaccttgcttaaaaattcggttgaaaaaaaagatttactctttataaatcatgctagtatataaccttcccttcaaagctcgcgcccagataacgctcattcatttgcggcgcaagaaaagttcaacatgcaattatttggattttttctttttttatgttttaagatagccatcctcaccgggaaataaaaagtaaaggattataataaaatggaaattgatattttcagcgagtgtgcttataccaccgtcggcatccgacaactcattaaccaaacctgggcggaaaaacgcgcgccggccggctttagccgcagaagggtctgctttatcgatgtcaccatcgccaactttgaagcgcgttaccgcgatgaatatgccaaccccaatacctacaaaataatcattattaccgactgcctgcatgagatggtgattgtcgacaataagaccattatattatcaaaccttatatcattgatccgcttcagccacctgatcggcgacttatataagcgttacagtcactataccgagccgccgcaactctctcagcgcgaatcgcattttctctcggagtggtcaacgggaaaatcgctggccgacatcagcaatgccatgaatatcagaaataaaaccgccaatcattacaaatcacgaatcatgaaaaaactcggcgccagcaggataaaaccgctgttgcatattacccgcgtacggtgtttgaccgagcgtttaaacataagaatcaataaagagtagttctctctcccccgcgccgcattggcggcagaacgcgttcgccggcgccttttaacagccccgccggcgaagatagccgtttcatcaatttgccaacctctctccgtggcgcccaatcgtctctcgcgcgcatcgttgtctggatctcgccgccgctttactggcattatctctgctatcgccgggcggcgagaaggcctaagaccgcgcccgccgctcagtatcgactcgacgagacaggtagctttacgccatggcaaataaaccgcaacagacaacgctgacgatgtacggcatcaaaaactgcgacaccatcaaaaaagcccgccgctggctggaagatcagggcatagcctatcattttcacgactaccgcgccgacggcctgaccgaacagcaactgcgcggtttcgtcgcgcaactgggttgggagccgctgctcaatacccgcggcaccacctggcgcaagctggatgaagcgcagcgcaacgcctgtgataacgccgacgccgccatcgcgctgatgctggcgcagccggcaatcattaaacgtccgctgctggacgacggcaacggccacgctctgctcggtttcaacgccgacgcttaccaacaatttatcgccgaggttgccgtatgacttgcccggttatcgaactggcccagcagttgatcaaacgcccttccctcagcccgagtgacgaaggctgccagcaactgatgatcgaacgcctgcaggcgatcggcttcaccgtcgaagccatggacttcgaagacacccaaaacttctgggcctggcgcggcgaagggcaaactctggcgtttgccgggcacaccgacgtagtgccgaccggcgatgaaaaacgctgggacaacccgccgtttgaaccggcaatccgcgacggcatgctgtatggccgcggcgcggcggacatgaaaggctcgttggccgcgatggtggtggccgcggaacgctttgtcgccgccaacccgaatcaccggggccgcctggcatttctgatcacttcggatgaagaagccagcgccacccacggcacggttaaagtggtcgaagcgctgatggcgcgcaacgagcggctggattactgcctggtcggcgagccgtccagcaccgaacgcgtcggcgacgtggtgaaaaacggccgtcgcggctccatcaccgccaacctgcatatccacggcgtacaggggcacgtcgcctatccgcatctggcggacaacccggtgcaccgcgccatgccggcgctgaatgaactggtggcgatcgaatgggatcgcggcaacgagttcttcccgccgaccagcatgcagatcgccaacgtgcaggccggcaccggcagcaacaacgtgatcccgggcgatctctacgtgcagttcaacttccggttcagcaccgaactcaccgacgcgatgatcaagcagcgcgtggaagagctgctggaacgccaccagttgaattacagcatcgaatggcggctgtccggtcaaccgttcctcacctcgcgcggcgcgctggttgatgcggtggtcaacgccgtcgagcactattctgaattgacgccgcagctgctgaccaccggcggcacctccgacggccgcttcatcgcgcagatgggcgcgcaggtggtggaactggggccggtcaacgccaccatccacaaggtcaacgaatgtgtcaacgccgcggatctgcagctgctgagccgcatgtatcaacgcatcatggagcaattggtcgcatgatcaccgcagagatgctcaccggccgttcgaccgaacacctggcgccgctgagcggcaaccatcggctgcagccgcaggcggtcaatgccttcctggcgatgcagcaggccgcgcgtgaagccggattcgatctccagcccgccagcaccttccgcgacttcgaccgccagttggcgatttggaatggcaaattctgcggccagcggccagtattagataaggacagtcaaccgatcgacgtcgcgccgctgtccgccgccgaacgctgtgaggcgatcctgcgctggtcagccctgcctggcgccagccgccatcactggggcagcgatttggacgtgtacgatccgtcgctgttgccggaagggcaaaagctgcagttggagccgtgggaatatgaagaaggcggttactttgcgccgctcaaccagtggctgacggcgcatatggccgagttcggtttctatcgcccctttaccgaagacagcggcggcgtggcggtggagccgtggcatctaagctaccggccgctggcgcaagaggctgaacatttgctgaccccggcgttgttgctggcggcctggcaagacaaggaggtcgccggtgtcgaatggctcgaacgccatctgccctcgattttttcgcgtttcatacgcagtgaaggaaaggagtagctatgcaatggttagctgattactggtggattattctgctggttctggtggggatggtcgtcagcggcatcaaggaactgcgccgcgtcgacgtgaaaagctatctggccaacaagccggagataccgccgcaccgcgacaacaacgcccagtgggatgacgaagacgactggccgaaaaagaaatgacatcagggcgctcatcggcgccctgagtttttagcgaaaggcgatcagctcgccgcgcttgccggacaatgcctcgtcccagtagcgctgcggcacgtaataatgcagcctttccagcgcggcgttcatcatgccctgattgatcgcatgcccgacgttctcttccacgtcgagcgtgaaatccacgccgttggcccgtaacgcttccgccgccgcgtgagcgtgttgcaccgcgatcaccgcgtcctcttcaccgtggatcaaatgcaccacgctgtcgccgaaagcctgctcaggcaactgggcgaaacgcccgctgaacgcgaccacgcgcccggccagccgggtttccgcttttaacgcctcaagtgccatgatcgccccctgcgagaaccccaccagagcagtgccggcatagcccacgccgctcagctgctgccaatgacgcaccacggccacaaactgcggcatcacgtctgctatgcgggccgcgcggttctcttcggtcacgtcctgtaccgaaaaccactggcgcccggcgccgttgccaaacgcttcgggaccaccgatgctcaccacctgggcctgaggaaagtctttggcgaagtagctgccgatctcccccatcgccaccgggttgtcgccgacaccgtgaaacagcaagatcagctgcgccgccggggtcgccgggctttggacaacgaaatgctcatgtttcatcgatgactccttaatagtaaccaaacctggtgtggcgacagtcgccgccgcaccgctgacagtgactatacgccgttgagaaatcgggaaaatcgggttttattgagcgagttattcaatttattgcaacgactgcgcccagtcgcgccagtagcggcagtgttgcgcattcaactgttccagcgcctgcgccgtttcgtgccgccagtggcgcagcaaggctttctggccgcttacgcccgcctgctccacgcaggccgccggagattgccgccgttgcagatggccgcgcagcgcgggcagcggcagactgctggccaacagcaaacgctgcaatgcccccaggctggcctccagcggccgatgggcgaaagcgaaaccggccagctcgcgccagtcctcttcaccgagcgacgtgtcgccgtcatcgcccgggatcgccagcacgagttcgatgcgctgccgcagccagggccagtcgcgcgccaggtgcttgtgcgccgcgtgccgcagcgcctccccttgctcgctcaggggcaagatagccatcgcggtataacagccgctgctggcctccggcttgctgccgatacgcaccagctcgaaaccgcaggattgccaaaagcgccacagcggctcggtatagccgaagctgaccgacaggaagtccagcccctgcgcctggcggcgttgccgctcgaccagctgacgcgcgataccctgccgccgcagcgtcggcagcgtcgcgatgcgggtaatgcgccgtgaccgcagcgtcggcgcccaccactggccgccatgcgccgccagcgactgcgccaccaggttgccgcgcggccggcggcggccggcccacacgtcgtgcgccaactcggcgctcaacccgccttcgtccgccagccacacggcaccgaccacctcctgtccggcctgcgccagcccaaaatgcatgccgggcgcgtccatcagccggcgtaagtccagcggcgaggtgcggtaatgcgcgctgctcagcagagcatagaaacgcgccagccgctgcggatcggcgcacagttcacgctgctccgcctggctgtaatcgatcgcctggccatccaccggccaggcgggcagctcgttgaacaacagcgcattgtccgtgacccgttccaacgcatcgccctgcgcccagcgcatcggctgttgcagactcaacgcctgataggacggcagcccggcgcaaaacttcagcagaaaaccgcggccggtgccttcatagccctgcaccgtggtggtcagcaacacgcgcgggaaatagccgatcagctgttgcaacagcggcgcggggatcgccgccgcttcatccaccagcagccagcccacgtcactgacgtccccttcccggcactgcgccagcaaggcatcgggcgcccaaaactgcgcgcgcccctgcgcccattccccggccacctcagtggcggcgcggctcggcccggtgatccagcaagtcagcggcgactgcgccaccagcatgccggccagcgtcgatttgccgcggccgcgggcggcggtcagcacccacacgccggactcggcctgcaacaacgccgtcaagatcgcctgttgttcctcggtcggcccgccatccggcggctgccaaccctcacgcgccggcagcgcggccagcgtcaggggctcatcctgccgccagacagtcacttcgctgtcatcggccaaatgatgctgcagatgatgaatgaaatgcggcgtggtgatcggctgcggacaatcgctccagcgcagactgtcgccgtccggtaactgaggccattgccgccagggcggcgtcaacagcagcagccaactgccggcgcgcaatgcgccgcacagcgccgccaacgcctccacgtccagcgactgaccggcgtcgaacactgcgtgcagccgctcctgccccagcaattggcgcaccgcgcggctcggcaaagccgtcaggccgggcggcgggttttcccccacccacggccagtcgcccggcagcgtcgccgccagccgctgcgcctgttcgcggcaccagtcaggttcaccgctgagcaccagcaggcgccggatgccctgccgccgcatgagttgttgcgctgcctgtaacataaggctgtatctcaatccgaaaaaaatgccggagtcaggctccggcacttgaggcgttaacgggatgcaaaggtattgcaggtattgggatcgccgctgtcgaagccttgtttaaaccaggtgtagcgctgctgcgaggtgccgtgagtgaagctgtccggcacaacgcggccctggctctgctgctgcaaccgatcgtcgccaatcgcctgcgcggcgttcagcgccgcctgcaggtcgccctcttccagcatctgctgcttctcggcgtatttaccccacacgccggcgaagcagtccgcctgcagctccattttcaccgacaggcggttcacttccgcctggctggcgccttgctgcatctggcgcaccttcggctcgatgcccaacaggttctgcacgtggtggccgacttcgtgcgccaccacataggcctgagcgaaatcaccgccggcgcccagtttggtcttcatgtcctgatagaaagacagatcgatatacaccgttctgtcgcccgggcagtagaacggccccatcgccgactgaccggtgccgcagctggtgcgcgtcacgccgcgatacatcaccagcttcggcggttgataggttttgcccatgcgctggaaaatctctttccagttgtcctcggtcgaagccagcaccaccgaggtgaatttggccagctcatcgtctttcggactgatgctggcgctctgttgttgaccctgcggcgcgacgttaccgccgttcaacagcggcgacagatcgatgccgtaataaccggccaccagcaccaccaccagaatgacgatgccgcccttgccgcccaccggcacgcggaaaccgccgccgccgcccaaacctgaagactgcccgcgacgatcctcaacattgtcactttcccgacgcccttgccaacgcataaatacactccagatatttcccctgctcgttgaagttgcgccgcgatcgtaagcgcaaaggcagcttcaagcctgagtgggataggttttagtcatctcgcatccatcattataaatggtctgccgcggaggaaatgtagaaattttctggaaaaacgcagaatagcgggacgatccggccggatcgccccgaatggcggtgccgacgcttagtcgagtttcacgccgatgcggcgcgccacttcttcgtaggcttcgatcaggccgcccaggctttgacggaaacggtctttgtccatcttgtccagggtgtttttgtcccacaggcggctgccgtccggcgagaactcatcgcccagcaccacttcgccgttgaacagaccgaactccagtttgaagtcgaccaggatcaggccggcgtcgtcgaacagctgggtcaacacgtcgttggcgcggtagctcagctcgcgcatgcgcgccagatgctctttgctcacccagccaaaggtttcgcagtaggattcgttcaccatcggatcgtgcatggcgtcgtttttcaggaacagatcgaacagcggcgggttcagcaccaggccttcttcgatgcccagacgcttcaccagcgaaccggcggcgcggttgcggatcacgcactccaccggcaccatgtccagcttcttcaccagcacttcgttgtcggacagcagacgctccatctgggtcgggatgccggcttcttccagtttgctcatgatgaaatggttaaacttgttgttcaccatgcctttgcgatcgaactgctcaatgcgctgaccatccagtgctgacgtatcgttgcggaactccaacaccaacagatcgggattctcggtggtgtaaacggtttttgcctttccgcgatacagctcagctagcttttgcatcttacttactccagtgatgtatccccgttgtctcccgagcgcggcccgaaattagggggtatagaattgacctaatgaattctttggcgtgccggacactattgtgccaaacctgcgacgcaaacgataccgtatagacaaaacaaaaaggggccgaagcccctttttgattagttaacgctggttttgctgaaggctgactggaatgccgccaccagtgcgtcgtttttcgactgggtgagcggtttgcctttcggatcgatgaattgcaggctggtgcggttgttgagatcgccgacctgcagtttgtaatcgccttccgtcagttcaggatccttgacgcccaacgcatcccaatcgctgctgctcagggacttgtaggtcacggcgacggtgccctgcggacggctgcggtcacccactttcatccccagtttttcgagcgccggcggcaggcgatcccacactacggtgtacgggccgcgcaccaccagcatcggcaggccggtgtcatcggcgccgctctgcacgtccagcgcgccgaagcggctggccgtctggctgctcgccaggttatcctgcttgtccaggccttcgatcagggtgttgatcatcatgccgttgtagcgctggatctcagactgatcggtcacctgctcggtcttgccctgctgctgcaggccaacgcttttcaccaccagcgcctgctggtagccctgctgctgcacgctgatctgataacggccttcgtactggttgtcttcgtccagacggttccacttcacccagtcggtggtcagggtctgaccggcgtcctgacgggaagcgatcgcgatgttcttcgcctgcagcaggctgaccacgcgcgaccacaggttctggttctgcgggctgttttccagcagcagcgtgccgctgtcgccggcgtattgcgcgcgtgaaccgctcagcagcgccaacggctgcaccggcggacgaatgtccaactgcttgccgacgttgccttgcaccgttgtggccggcacgtcatagttgccgctctgcaccggcaggatcatgccggacggcgcgttcagcgccttgagcggagccgcgtcgaggtaggcctcgtcgccgctgacctggcgcttgtagcgctgatcgctgctgcaggctgccagcatcatcaccaatgagatgcccactacttttgctaccgtcgacttttgcaatgaataagccatcaaatttcccttagagttacagcaagccgacgcttttcagcgcgcgctccaccaccgggcgggcggcttcgctcaacggcgtcatcggcagacgcagcgtatcggttgccatcaatcccaacgccttacaggcccacttcaccggaattgggtttgcttctacaaatagatcctgatgcaacggcatcaagcgctgatttaagcggcgcgcttcggcaaatttgccctgcgccgccagcgcgcaaagttccgccatctcgcgcgcggccacgttggccgtcacggaaatcacccctttgccgcccagttgcatgaagtccagcccgctggcgtcgtcgccgctcagcaaaatgaaatcttcatcgtcaaccagcacttggatctgactaacgcgacttaagttccccgtcgcttcttttacagcaacaatattcttgattttcgccagccgagcgatggtcggcggcagcatgtcgcagccggtgcgcgaaggcacgttatacaggatctgcggcagttcggtgctctcggcgatcgccttgaagtgctgatacagcccttcctgcgtcggcttattgtagtacggcgttaccgtcaggcagcccaccacgccggtgttggcgaagcgagtggtgagcgcgatggcttcggcggtggcgttggcgccggtgccggcgatcaccggaatgcggccgtcggccaactccagcgtctgcagcaccacgtcaacgtgctcgtcatgggcaagcgttgcggactcgccggtggtccctacggaaacgatcgccgcggtgccactggctacatgataatcgatcaattttttcaggctcgcgcgatcgacagcacctttgtcgtccatcggcgtaaccagtgcaacaatacttcccgtaaacattggccgtcccctccacaaacaagtcactcatggtacttttgctgcctatccaaaagcaagcgcacaaccgcgttgtaagcgcttggcaggcggttttttttatgtttaccatggtaaccccattaagcacgacaggaagcgctattttgcctcagtcagacgaacactatctcgtgattaccgcgctcggcgccgaccgccccggtatcgtcaataccatcacccgccacgtcagcagttgcggatgcaatatcgaagatagccgtctggccatgctgggagaggagttcacgttcatcatgctgctgtccggcagttggaacgccatcaccctgatcgaatccaccctgccgcaaaaaggcgcggagctggatctgctgatcgtgatgaagcgcacaaactcgcacgaaaggccgccgatgccggccacggtgtgggtgcaggtggaagtgaaggactcgccgcacatcatcgaacgctttaccgatttgttcgactccagccagatgaatatcgccgaactggtctcgcgcacgcagccggcggacggcgacctgccgccgcagctgtatatccaaattaccgcccacagctccggcgatcgggacgcctcaaatattgagcaagccttccatcgcctatgtacagaattgaacgcgcaaggcagtattagcgtggtgaactatccacagcatgacgagaaagatggagagtagtgatgagcccattgaaagccggtgacacagcgccgaaatttagtttgcctgaccaggacggtgaggaaattaatttggccgacttccagggacagcgagtattggtctatttctatccgaaggcgatgacgccgggctgcaccgtgcaagcctgcggcctgcgggacaacatggacgaattaaaaaaggtcggcgtcgaagtgctgggcatcagcaccgacaaaccggaaaaactgtcgcgcttcgccgaaaaggagctgctcaacttcacgctgttgtctgatgaagatcatcaggtgtcacaacagtttggcgtgtggggcgagaaaaccttcatgggcaagacctacgacggcattcaccgcatcagcttcctgatcgatgccaacggcaagattgaaaaagtgtttgatgatttcaaaaccaccaatcaccacgacatcgttctgaactacctgcagcagtaattctcacgaagcgcagcggcctgctgcgcttcgtttcttccctgtcagtcggccttgtcttccacctcgacccgcagttcatccggccaggcatggatcaccgccttcaccagcgtcgccagcggtatggcgaaaaacacgccccaaaagccccacatcccgccgaacacgatcaccgacaggataatcaccagcggatgcaggttgaccgcttcggagaacaaaatgggcaccaacaggttgccgtccagcccctgcaccaccaggtaggcgacgatcagcgtccagaaatcggcgccgacgccccactggaacagcgccaccaccaccaccggtatggtgaccagcaccgcgccgatgtaggggatcagcaccgagaaccccaccagcaccgccagcagcagcgagtagcgcatgtccagcacggcgaacaccaggtaagtcgccacgccgacaatcaccatctccagcactttgccgcgaatgtagttggtgatctgctgattcatctcgttccagacttgccccgccaggccgcgattgcgcggcagcacgcggcgcaccgcgttcagcagctgttctttgtccttcagcaggaagaacatcatcatcggcaccaggatcagatagatagccaacgtcagcaggccgaccagcgacgccagcgagaatttcaccaccgattcgcccatgccggacaaccggctgcgcaggttttccgccatcatgtcgatgatgccggcatccaccagcgccggataacgcttcggcagcgtcgcggcgaagttatagaactgattgagcatgcccggcagatcgctcatcagattgatgccttgctgccaggcggtcggcgcgacgacgaacaccagcagcatggcgacgcccgagaacaccagcagcatgatgctcgccgcccaggtgcgcgaacagccgatgcgctgcaggcgcgcggtcggccactcgagcagatacgccagcacgatggcaaccagcaacggggtcagaatgccgtgcaaaaaatagagaataaggaacccggcaaccaggatcaccagcagcgcgatggcctgaggatcggtgaagcggcggcggtaccactgtaataacatctccagcatcagagcgggctccttgagatttggcgggcgggcatggcgattcctgtgatgggcctgattaaagcatagatagaacgggcgcacgcgggatgtgcaaagcactcagagtactcaaagttcgccatacatcaacagcgatctggctgattttatcgcacgggcagacgatcgacgcaaaaatccgcagacgcggcgactggctcgatgagcggccccgaacggggccgcggaagattacagcgaagtagcgacagaaaggggcgaaccgaccgccaatgcgaacaacaacacacagccaatcgcgatcgccgccgccagatcatttttcattgtcccgtcccctgatgcttaaactggttatcgtcacgaactctgtcggttctacgttcacggccttttccgatgcacgtcattaaaaacccccgcctaagcgggggagaaaacgttctggtgcatcaagtgttacaaggaggtcatgagggattgctaaccctaaatgactatttcaagctaggattattcccagaacatggcaagcgatcgcgtcgaggttatccgcactttgggataaacctcataaaaaaatcccgcacggcagcgggatgaagggatgataacgtcatgaattttttatgcggacaatgaggcggtattgtcgtcatttggcgacaataccgcgccggcacggtggtcacaagggaaatttggccacggtgaggaaatcagaatttcgccaatgcccgcgatcgcgcgcccgtcagcatcaacgaaaaaatgggattttcgtcagacagccaccgggaaaaaaccggtagcatggccgatataatcccaaatgccgtagggggaaaaatgaacagcaaaccgtgtgaatttgatgaagccatctgtctggcgatcgggcgtggcgtttgcgaagtcgtcaagataggagatgaaatcagcatcttctccctgctggaagccatcgagagcttcatcgaacggcaggcgctcagcgaaagcgaaatcgcggcggcggacgacgcgctggatttgatcaccggtttggttcgccgccagtgctgacgcctgttacgaggcgcggccgatgagccgttgctctaccgtgacgccgggcatcatttgccgtaaaccggcaatcaattcgtcgcccgcctcgtgcagcgccgccaacggcatcgccggcaggctctccaggatgaaccacatccgctcggcctcggcgctcaaccgggttctgaccccctggcgccaattccagcatcgccatcctgtgcaagctcgcggcggcgctgggcctgtcggtggcggacatcgtcaacgtcacccgcgcgcccgccgtctacctgattgaaagccaagatattcccacgctgtggcatggcgatcgcggcggctcggcacgtttgctcgcgggcacccaaggcccgaacatgatagaactgtggcggtgggaaatggcgccgggggaagcctatacatcgggcggccacccgacgggcaccttcgagctgctgcacgttgagcgaggcgtcttgagccttgccgtcgaacagaccgagctcatgattgcgccgggctgttcggcggtcgccaaaacggacggcccacatcggtacgccaacgaaggcgaagacacgctgattttcaccatgacggtcgccgaactgcacgcctgaacggcgaccctgacctgaacgcttgcacaggagaagagccatcatgacaacccctgccccactggagtggcagcgtgcggactatctcgtcagcaccgatcccgccctgctggatctcgatgccatccacgcttttctgacccgttcgtcatgggcggaaggaatcgatagagaaaccgttcgccagtccctcgcccacagcttgtgtttcggtttgtatcacggcgccaggcagatcggtttcgcccggctgatcaccgattacgccactttcggctatctgtgcgacgtgtacgtgctggaaacattccaaaaaagcgggctgggcctgtggctggcggaatgttgccaggcccatccgctgatggcgacgctgaggcgagtcatgctggtcaccagcaccgccccctggctctatgagaaagtgggctattcggccatcaaccgccccgactttgtctggcagatcgcccggccggacatctaccgacggtaatgttatttcagcgcctgctcggccagcagcccgagggcgatgacgatcatcgccgcgccggagatgcgccccaccacctttgcggcctgaggacgcgtgcgcagcaccgactgcgaaccaaaccccaccagcagatacaccaggccgcagctgatcaaatgcacgacgcccaacgccagcatctgcatcggcaccgaccattcggctcgggcgtcggtaaattgtggcagcagcgccagaaacagcagaaacaccttggggttcagcccgctgacgcacacgcctttgccggcccagcgcagccaggaatcggaacgctgatcttcaccggcgccgggcaccggcgggtgcaacagcatgttgaaaccgatccacaagaggtaagccgcccccaacagggtgagcgccgtcagcgccagcgggttgccgaccagcagcgcgccgacgcccgccaccacgatcgcaatcatcaacaaatggccaaacagcaaaccggcgacggcgggcactaccacccggccgcgaatacccgccgagatcacataggcccaatccatacccggcgtgatcaccaacaaaatcgacaccgcccaaaacgcggcgaacagagcgagcgtcatgccggcgccctctcaaacgcaccgcgccacaccgaacagagaaccattgcgctttcctcgtggaagaagaacggcctccgcctgccgcgggggccgtcaaaaccgttcaacagatggcaagaatatcctcatgacgttaaaatgtgctttcaattacttgccttaaatcggcataaacggggaaatttttccaaatggataagattgatcgcaagattcttgctgaattgcagaccgacggccggttgtcggtgaccgagctggccgagcggatcggtttgagcgtgtctccctgtcaccgccgggtgcgggcattagaggagtctggggtgatcaggggttaccgcgcccaactcgatcccagcagcctgggctataacttttccgctctggtgttcgtcaccatgcgcgaaggcgatcgccgcgccgttgaaaccttcgaaaacgccatggtggacattccccaggtggtgcaagcacagcggttgtttggcgatcccgactatctgctgcacgttatagcccgcgatctgcccgccttccagcaactttacgacgagaagctctccgccctgccgggcgtgcagcgcctgagctccacgctggtgatgaaaaccgtggtgccggaacgctcgttcctgccgttgggaaaatgaggacgggaacgttgccgctcccgttttgacgaccttaaggcacaatcacgaaatccggattggcgatggcgaacagcgcctcgcgatccgccgccggcggataaatccactgcgtgttgatctcctgcttaatctttttgccttcctggcgggtaaaacgcacctggcgctgccagccttcggtatagagcgcgccccagggccccaaatccaggcaggtcacatacttcggctggctgtacggatgcgtcggcaaccccgccagctccgccgccgcattgtggccggccacgcggccaaggctcatcgcatgctggcaggtcatcaggttgtgattaccgagatcgtcggtcgccgccttcaccgtatcgccggtcacgaaaatgcccgccgccgccggcgcgcgcaggaaggcatcgccgatcacccggccgctgccgtcgcgctcgccagggatctgctcggtcagcggatgcgcccgcacgcccgccgccaggatcaccgtgttggcagcgatacgctcaccgttcgacagcatcaccccctcggcgtcgatggccgagacgcgcaggccggcccgcgcttccacgccgcactccgccaacgcctggcgtatcaccgcccccggctctgcccccatccccgcgcctacttccggcgcggtatcgacgatcaccacgcgcacgttctcgtctttgcccagcgcatcccgcagccgctgcggcatctccgccgcgctctccagcccggtcagccccgcgcccactaccacggcagtgttgcgcgcaggcgtcgaaggtttggccgccagcgcattgatatgggcgcccaaacgctgagcgctttccagcgtatcgacgttgaaaccgtattcggcaaagcccggcaccgcaggcacggacagccggctgccggtggcccacaccaaacgatcgtaggccaactcaaggggttcccccgccgtcggcgccaccgtgagcgttttagcagcggcatcgatacgctcaacaaccccggccaggtgtcgcacgccaacggcggcgagctgcgcggaaatgtccgggttcatgttttccaacaccgcttcatacaggcgcgggcggatggtgaccgttggggtcggcgagaccatgagcacctcgatatcgtcatgcttaccggcgagggtaatggcgcgcatggcggacacggcggcccaaaaaccggcaaaaccggaaccggcaatcactattttctgcgtcatgggatgactccttcatacagggttaaccgggcgataaggcttgcccgcagttttttcggatgaacgatgccgttccgctcccgtaacagggtgcagaaggcccgcccgccccttccgaagaggcgggaaaaagtgtgtttcgcttttttaaggaaaggcggagcttaggttttggcgcgcgccgttttgccgctgcgcgcggtgcgttccgtcatgcgttcgtcgagccagaggttgacctcaccgaagaagccttgcggcgctttgcggccaaagcgggccgcgacgtcgccgagggtctgcgccgccagtgcgtcgcgcatcgccttctccgcctgcagcatcaccgcatggatagcgcatttgccggagaccgcccaatccggcggggaatcatcgaacaccgcacagcgcccgcgcacctcctggcaatcgaacagcggcttgtgcccctcgatggcgtcgataatttccagaaaactgatctcgtccgccggacgggccagccggtaaccgccgcgcaccccttcgctggcggcgacgatccccgccttttccagcttgggaaaaatcttggccagaaagctgggggagatgccctgcagctcggcgagttcgcggctgctgagcgcgcgctggttatcgccgaccagccacagcagacagtggatgccatattcaacgctggttgtgatgtacgccatatgtccgttttcgaccgtcagtgaatcttcaataacgcagactatatgagtctgcgtttatcctgtcaataaaacacggatcaactttgtccgcgttcaattcaaaatgcatgtcgccagcgacgaaaaagcgcccttcaaaatgaaaaataaaacttttttgctcgattcgcgctcggctaacgtttccttgtcgcctgcggctgactatgatgtgatgggtgccgccgccgcggtttgtgagccgccgcactttcgcgcggattgcgccgcgggaataaagaactcttgtctgctgctgacgtcttagaaatgattatttaagggaaacgcctgactatgaccaaccggttgaccaaaaccgcgttagcggtgctgctgctcagcacgctgaacgccaccgccctggcgccagcacaggcggaaagccaggaccagttgccggatatgggcacctccgccggcggcaccctgagcatcggacaagagctggcgatgggcgatttctatgtgcgccaactgcgcgccagcgccccgctgatcaacgatccgctgctgagccagtacatcaatcagctgggcaaccggctggtggccagcgcctattcggtgcgcacgccgttccatttctatctggtgcgcaacgacgaaatcaacgccttcgccttcttcggcggcaacgtggtgctgcattccgccctgttccgcgtcagcgacaacgaaagccagctggcctcggtgctggcgcacgaaatctcgcacgtcacccagcgccacctggcgcgcgccatggaagatcagcagcgcaacgccccgctgacctgggtgggcgcactcggttccattctgctggcgatggccaacccgaccatgggcatggcggcgctgagcggcaccatggccggcacccagcaaggcatgatcagctttacccaatcgaacgaacaggaagccgaccgcatcggcattcaggtgctgcagcgcgccggtttcgatccggaagccatgcccgacttcctgcagaaactctcggatcagtcgcgctacgcctccaagccgccggaaatgctgctgacgcacccgttgccggacagccgcctctccgacgcgcgcaaccgcgccaaccagatgccgaaacacatcgtgcagtcttcgcaggactacctgatggccaaggtgcgcgccctgggcatgtacagctcggaaggctacggcctgaacgaagagctgctcggctcactcagcaagggcaacgtgcgcgaacaggcggccgccaaatacggccgcgccattctgttctatgaagcgaaaaaatacgacgacgcgcgcaacatcattcagccgatgctggcgcaggatgcgaaaaacgtctggctgatcgacctgatgaccgacatcgatctcggtcagaaacgcgcgccgcaggccatcgcccgcctgcaggcggccaacgccgcccagaacaacaacccggtgctgcagctcaatctggccaacgcctatgtcgaaggcaaccagccggcgcaggcgtcgaagatcctgaaccgctacacctttgcccatccggacgatccgaacggctgggatctgctggcgcaggccagcgccgctcaggggctgcgcgatgaagagctgtcggcccgcgccgaaagcctggcgctgaccggccggctcgatcaggccatcggcctgctcagcaatgccagctcgctgcagaaactcggcagcctgaaacaggcgcgctacgatgcgcgcatcgaccagctgcgccaactgcaacagcgcttccgccaataccagcgcagctgattcaacaaggaatgaacgccatgaaaaacgtcacgatttaccataacccgcgctgctccaagagccgtgaaaccctggcgctgctggagcagcacggtgtcgatcccaaggtagtgctgtacctcgatacgccccctacggtcgatgagctgaaaaaactattgaaagaactgggcttcacatcggcgcgcgatctgatgcgcaaaaaagaagatctgtacaaggaattgaagctggcggacgacagtctgagcgaagagcaactgctggcggcgatgacggcgaacccgaaactgatcgaacgaccgatcgtggtgaaaggcagcaaggcgcgcatcggccggccaccggagcaggtgctggagattttgtaaattcgaattcgggcgcggactattgcgccctttcttttacggtagcggctacagccccaggatctctttaacgaacggaatggtcagcttgcgttgggcagtgatcgaggcgcgatcgagctgatcgagggtcataaacagcgtgcgcatctcgcgatccagccgcttcagcaggaagcggcccacgtcttccggcagttcgaagccgcgcagtttgccgcgcagctgcagcgccagcagcttctcttcgtccgacagcggctgcagcttgtagatctgcccccagtccagacgcgaagccagatccggtaaacgcaggttcagctgacgcggcgggcgatccccggtgatgaacaaacgggtgcggccggtttccaggatgcggttgtaaaggttgaagatcgccatctcccactcttcgtcgccggcgatgcattcgatattgtcgatgcagaccagcgccagctgttccatgccgtccaatacttcaggcacgaagtaagcgcgcttgtcgagcggcacatagcccaccgcttcccccttctgcgaaagctcggcgcaggccgcatgcagcaaatggctgcgcccgccgccttcacgcgaccagaaatagatatagctgccatgttcctgacgaacggcggattggatcgcggctaatagggatgggttctcgcccggataaaaactggcgaaagtttcatcatcgggaagataaagtggcagtgaaagctgtgccggcgtattcagagaagcacctcaaccaaaactggcagaaaaacgtgggcagtttaacacagaaaacgggcgctgttgaaccggcaggatcttatgccgcaatagtgaacaatgcctaagcgccgcttgattggctgcggctcccgccaaggcaagaattatccgatatcattccctaaccccatgcctgcgcaggttaaatttgtcatttaagccaaatctggcctagtataggtaggctaaacgcaatcaccatcaacaaggtttctgcaaggatatagacgatgaaagtatggaataaagtgctgttggcctcctttatcgggttgttggttgccggctgtgatgactcgtccaaggttgacgccaacctggataaagccaaagacagcgccgagcagatgaaagacgccgcccagaaaaaagcggacgatctgacggacaaggcgaaagcgacggcggatgaaatcaaaaaagaggccgccacgcaggctgaccagctgaaggacaaagcttcggcgattaaagaagacgccgccaagcaggcggacgccatcaccaacgacgccaaggccaaggccgccgcgatcaaagatgacgccggcaagcagagccagcagttggtggatcaggccaaggccatcaaaaacgacgccatcaacggcgccaacgatctgaccgagcaggccaaggccaagaccgaagccatcaagaacagcgccgaaaacaaagcgcaagagttgaaacaagagaccgatgcggcggtgaacggcaatactcagactcagccagccacccagcagtaagctattctcagccacaaaagaaaggagcagtaaatggggattatttcctggattatcttcggcctgatcgccggtattttggctaagtggatcatgcccggcaaagacggcggcggttttattctgaccgtcgtgctggggatcgtcggcgccgtggtcggcggctatatcagcaccttcttcggctacggcaaggttgacggcttcaacttcggcagcttcgtggtggcggttatcggcgccatcgtggtgctgttcgtgtaccgcaaaattcgcagctgaggcgaatgccatcagtcaaaagggcagcccctgggctgcccttttcgttacttctgctctgccggttcgtccggcgcgtcgagcacctcttcttccttgcggaacaggctgatgaccttgaacagcaggctcaagccaatgccgacgatggtcgccagcgccatgcctttcagctccgccgcgccgatgtgcaccttggcgccgctcacgccgataatcaggatcaccgaggttaaaatcaggttttgcgctttgttgtagtccactttggactcgatcaacacgcgaatgcccgaggcgccgatcacgccgtacagcagcagggaaacgccgcccatcaccggcaccggcaccgcctggatcgccgccgccagcttgccgatgcaggacaacaggatcgccagcaccgccgcgccgccgatcacccaggtgctgtagaccttggtgatggccatcacgccgatgttctcaccgtaggtggtgttcggcgtggagccgaagaaaccggagaataccgtcgagatgccgttggcgaacatcgaacggtgcaggcccggatcgcggatcaggtcttttttcacaatgttggcggtcaccaccaggtggccaacgtgctcggcgatcaccaccagcgccgccggcagaatggtgaagatggcgaaccactcaaagcgcggggtgtagaaggtcggcagcgcgaaccagtgcgcctcgcggatcggagtcaaatccaccacgcccatgaagaatgacaacgcatagcccaccagcacgccgatcaggatcgggataatcgccaggaagccgcggaacagcaccgagccgagcaccgtgaccgccagcgtcaccagcgaaatggtgatggtggtcgagtcggcgctggcgccttccgccggcagcagccccgccatgttggccgccacgcccgccagctccaggccgatgacggcgacgatcgcccccatcgccgccggcgggaacatcacgtccagccagccggtgcctgcctttttcacgatcagcgccaccaggcagaacagcacgccgcacatgatgaaaccgcccaacgccacttcgtaaccgagcggcaacagcagcagcaccggcgagataaacgcgaagctggaaccgaggtaggccgggatcttgcctttacagatgaacagatacagcagcgtgccgatgccgttgaacagcagcacggtcgccgggttgatcttgaacaggataggcaccagcacggtggcaccaaacatggcgaacaggtgctggaagctgagcggaatggtctggagcagcggcgggcgctcgctgacgccgatggcgcgacgggtcatgtgtgtttttcctcggtttattggttttataggttttagtcaaaaaaaagccgactcattaagtcggctcaaatgtttacttggtaccaaatatcttgtcgcccgcatcgcccaggccaggcacgatgtagcccttgtcgttcagacactgatcgatggaagcggtgtacagttcaacgtccgggtgcgctttctccagtgcggcgatgccttccggcgccgcgaccagaaccagcaccttgatgctgtgacagccggctttcttcagcagatcgatagtggcgatcatcgaaccgccggtggccagcatcgggtcgacgaccagcgccatgcgctcttcgatgttggaaaccagcttctggaaatacggcaccggctccagggtttcttcgtcgcggtatacgcccaccacgctgatgcgcgcgctcggcacgtgctccagcaccccttccatcatgcccagaccggcacgcaggattggcactacggtaatctttttccctttgatctgatccacttcaactggcccgcaccagccttcgatggtgactttttccgtctccagatcggcggtcgcttcataggtcagtaaactacccacttctgaggccagctcacggaagcgtttggtgctgatgtcattttcgcgcatcaggccaagcttgtgttttaccagcgggtgtttcacctcaacgatcttcatcatttttctcctattaaggtggttgcggccaaaaaaatcgcgggattatacctcctttttttcgctgcgccacccacaatagcccgatcgggatcaacaaaagtttgaatatcagtatagatgacgaaaaagcggagccggttcacaagccgctcgcaaacgtttgcctgcgctgttagaattgccgcgccttattccggaatcaacatcggaagcacagttttcaaaccgcaaaccgtcgtggggaatcgcgcagtgaccgacaaaacctctctcagctataaagacgcaggtgtcgatatcgatgcaggcaacgcattggtagatcgcatcaaaggtgtagttaaacagacccgtcgcccggaagtgatgggcggtctgggcgggtttggcgccctgtgtgcgttgccgcagaaataccgcgagccggtgctggtttccggtaccgacggcgtgggcaccaagctgcgtctggcgatggatctgaaacgccacgacaccatcggcatcgatctggtggcgatgtgcgtcaacgatctggtggttcagggcgccgagccgctgttcttcctcgactactacgccaccggcaaactggacgtagacactgcggccagcgtgatcaccggcatcgccgaaggctgcaagcagtccggctgtgcgttggtgggcggcgaaaccgctgaaatgccgggcatgtaccacggcgaagattacgacgtggccggtttctgcgtcggcgtagtcgaaaaatccgagatcatcgacggcagcaaagtgcagtccggcgatgcgctgatcgccctgggcgcttccggcccgcactccaacggctactcgctggtgcgcaagatcctggaagtgagcagcaccgacccgaccgccactcagctggaaggcaaaccgctggccgaccacctgctggcgccgaccaaaatttacgtgaagtccgtgctggagctgatcgagaaggtggacgtccacgccatcgctcacctcaccggcggcggcttctgggaaaatattccacgcgtgctgccggaaggcatgcaggcggtgatcgacgaagccagctggcagtggccggcggtgttcacctggctgcagcaggccggcaacgtcagccgtcatgaaatgtaccgcaccttcaactgcggcgtaggcatggtcatcgccctgccggaagccgaagtggaagcggccatcgcgctgctgaccgcggcaggtgaaaaagcgtggaaaatcggtaaactgactgcctcttccgacgaacaacaagtggtcatcaactgatgaaaaagatcgtggtgttggtctccggccaggggagcaatctccaggccctgattgacgcctgccagcagggccgcatcgccgccgagatcgtggcggtattcagcaacaaggcgcaggcttacggcctgcagcgcgccgaagcggcgggcatcgccgcccaggcgctggatgccaaggcttacgccgatcgcgcggcgttcgacgccgcattggcggacgccatcgaccagtaccagcccgatctggtggtgctggccggctacatgcgcatcctcagcccgcagttcgtgcagcgctatgccggtcgcatgctgaacattcacccttccctgctgccgaaatacccggggctgcatacacatcgtcaggccatcgacaacggcgacagcgaacacggcacctcggtgcacttcgtgaccgaacagctcgacggcggcccggtgatcttgcaggccaaggtgccgattttcgctgacgatgaagaggatgacgtggttgaacgggtgcaaacccaggaacacacgatctatccgctggtggtgagctggttcgtcgacggccgcctggcgatgcgcgacggcgccgcctggctggacggcgaacgcctgcctgagcaggggcacgccgccgactgatgcgcgcagcctgaaccttgcctaaacggcgcccacgcggcgccgttttttttcgccttcatccattctgtgaagttatactttgcacaatttcacggcacagaggagcccacatgtccagcactgccagcgtcaggttacgcccattggaacgggacgatctgtcgttcgtccaccagatggacaacaacgccagcgttatgcgctattggtttgaagaaccctacgaagcctttgtcgaactttccgatctctacgacaaacacatccacgatcagagcgagcgccgctttatcatcgagcacgaaggcgccaaggtcggcctggtggagctggtggagatcgatcacatccaccgccgcgctgagttccagatcatcatcgatcccgcccaccagggcaaaggctacgccagcaccgccgcccgcctggcgatggactacggcttctcggtgctgaacctgtacaagctgtacctgatcgtcgataaggagaacccgaaggcgatccacatctacagcaagctgggctttaacgtggaaggcgagctgatcgacgagttcttcgtcaacggcgaataccgcaccgtgctccgcatgtgcatcttccagccgcaatatctggcgaagttcaaaactcccaatgataagccgctggtgaagtgacaattcgcgagaaaaaagagaaaacccgcccaggcgggttttttattggaaaataattggctagtattaaggcatgctattttatcgtcaggaaacaacctgatgaatacgaaaataagtaacattctccaatataattaatcgaaaaataattaatagtgatagtaagagttaccctctgcctctacaaaggaaaaatgccatgacaaccgtctcaaacctgctgctttttatcggcctggcgatgctcgccatcgccgccggtctaaatacctacagcggctacgcgcctgcagatcccaacagcaccccgctgttttccccgctctggtggacgcgctggttcccgctctatgcctcgggcgctgcgttgttggtggtggggttggtattgcgggttacggggcggggacgataaaaacccaatttcatcgtagatattgcagagcgatatatgcgccatattcattatcaaagcgaatacttctgcaatgtgcatatattgcaaaccgaatcattttaaaacaccaataaaataaacacattatttttattactgcgtaataaaaaacccacttttgcgggttttttattaccggttaacagcttatcacgccactaacagtatcagtaactacgtccaatcttggtagccgtcttcatgaatccagacaaggccaccagggcattcctcttcatagaaccaaatgtcttcattttttgttttccattcctcttctgtcttagggaatacagctttgtaatgtgttacctgttcttcaatgtctccctcaaggaattggccatgtttgcctaaccttactcttccttcagccataaggtgatgaattaattcgaaaaaatagtttttcttttcttcgtaggacaatgtattcctatcaaaattatcagctctcatagctgaccatacggttccaatggaagcaccgtccaactcttcactaaacagtttgtattgatcatcgctatacaacatggttgccctcatcgaaatttgatttctactctttttttcactttaccttgaagcgcattcagctgttcattatctatgatatcaatcgtccaacgtgctttggtatcttcctggctacttgacacactcctaagagttaatttctcacctgttttttcatttaaaaccaccgtccatagtgcatcttttctgacttctattaatggtttccctccggtaagagattgcgcataatcgaagatcgcctgtttcgataaattctcagtggcaaacacttttgtattaccttgcttgttgctgccgccctcacctaatacctgctcgaactgctgaccaaacacgtttagcttactttcgttctgtttcggatcaaacaccttgaccaactggttagtgttagctttctgcatgtcccgcagataatctgccgttttagtcgacaaattcatcccggctgccgtttctcctttgataaaatcggcaaccggctgagtgttgaacgtttttgttttgtatagttcatcggaagcgttcaccagctgtcggctcaacttcctcacgctgtcttcggttttacccaaaatcaatgtgctgccggtcgttacggctcccgtaccaatgatggcctcaggtgcaacaatatctgccgcataaataccggcttggttcaggcaaagcgcggggttggttttgcaaccggcaatcgccaatcttgcagccagaaccaattctggcgcagcgcccaccaacgtcatcccccccgcagtaagtaccagaccgccaccaccgacggtcgccactattgcggcagcctctcggcgagccacaacacgttttgccgcagcaacatcgcctttatcagcggccagaatgtctttctgattatccagcgcatactgcatcaacatatgttcggtcatgttgtagcgataaaccgactgtgcactgtccgcagcgctgtaggcgccttccggtgtatgcgttgtcaacgccccggtcaaagccccgatcactcgtgccgtttgctcttttacttcattgccgtttagcgcctcctgcagacggtagagctggcgttctttttcgttgagattggccggttcgaacaacgtgctctgcataacgacgccggccagctccgccgccagcgccccggcagcagcccctttaccgtcgccgcgcccgatttccgcggcgatgcccgccacaaccgcatgactgactgacttcccggccgcgcccaggacttcgccgttatccccaatcagattggcaccctcggcctgcacctggctgccgatgttcgccagcagcgcattggtcaggttgtccttgaagctgccgccattgatggcggtattcaggctggagctgatgaccgattgcccggccacccgctgcgccactttgctccagtcgccgttgctcagctgcggcagtttgacgttgttcgggttaagcggtttgcccgccgcgtccttgctccagcccatagcgctgtcgaagccgttgagcgcgccgccgatcgccatcgccgtggcagtcgccttgacgttttcattgctgcccagcgcctgcagggttttcgacaggttgccttgattctccactagcgcgactgccgcctgggaggccagcgaagacatcccggcggtgaccgcgccgctggttaccgccccgccgcccacggcgccggaaacgctggaggccgccgtggccgccaatgaactgcctgcggtcaccgccgcggctgcgatggcgatcaccgccgccaccgccgggttcaagtgctggctcttgtaatcccagctgtcgtaggcgtccttgaccttgctccactgcacgtcgttgcgcttattcagatctttgacccaggtagtgcccggcgtattgcccagcgcgtcgatagcgctttgcaacgcctgcccgttttttaccttcacatcggcgctgacgcccttggcggcctctacggtcaaggcgccaccggtatgaatgctcggcagcacccacttattgtcttcgtagcctttattggcctgcttgataaagaagcctttcgaattgctgacggtctgttcgaagctagtgttcttcactgccctgaagttaacctgaccatgcgtgctggtcaggcgcgcgttttgcccggcggcgattttgctggcttcataggtgctgtcgtcgcggctcatcagcgtgatattgccggcggcggtaaactcggtaaccttgttggtcacgtcgtggcgggtctgcttaacctcggttttcttgccccaccatttgcgcttggtttcctttttttcgtaatggctggactcttccatcgcctgggcgtagagatagccgcccttggcggcgatatccatattcccggcgcgcatggcttcagcctggttgtgggcgtcgacctgagctttttgcttagcctcgtctgcccctttgcttttagcttcattgcgtgcggtagtcagacgtgattgtgcgccatcgcggtcttgggtggcctgagagaggcgctgttgtgcatcattgagggcggattgttcggcattgatttcattggggagcgcattcgctcgcttctccttttccaataaatcatgggtaatgccgataccttcggctgcgatggcagcactttgttgccataaaccccagtcgtttatttccattagcttgccgtgcttggctgtaaactcttgagatttcttgattacctccgcttgtctttgttttagcgagttaatgtcacgctgcagcgtagttaactcattgcttttaccgtgcttcgcttgttcagcgcgactcttatcctgctgcgcctgattaatgcgctgctgcgcattttgaagttgctgctcggcaacggcgatgcggctgccccaatcagtcaccgctaccggcggtttccagtttgcccccaaccctttcactaccagtttggtcgcctggaacagaatgctgccgccggaaatcaccgtcatcaggccaccggcattcagctcggtcccttgctgggtgcgagtttcggtaaattcgttgccaccttctcggtaagtgtggttttgcaccgcctcgaagcgcatatcgccgccggaggttagcgtcatgttagcgccggaagtcaacctggcaccgtaagtcagcagttggttgttcgccgccgcggtcaggtttttcccggcgctgagggtagtgaccacatggcgatcgtctttgttgttgtcgttggcagcatcaatggcggaataggcgacattcgataaccatagattctgcccggccagcagcgtgatattgccgttggcggagagcgcgccgccctgggtgccgatgtcgcgggccgagttaatcagtaaattaccgccagcgtgtatcttgctgccgagttctggggtacgtgaggttgcaaaaagatgcccagaattaccgcccagcgcccggtagttgaggtcggcattatgcccggccagcagcgtcacatccttgccggcattgatgttgacaccgcgcagcgccagataaccgccgctattgagtgagaccgagccggtggcgttcagttttcctgtgttcaacaggccattgaagtagtgttgcagcttgtctgatggcagatattcaccgggacgatcgcgcatcagtacggcatcatttttgataagagagatgctaccggaagcagtcatgctgatattgcgactttgtggcgccagcaacgtattgagcagcgtaatggtgctgcctgcagtcagcgtcaggtcacgagaggccagcagactgcccagccaacgcacaccattctgatggtagtaattaggcttttcgctggtgtgaacttttatctcaccggtacgcgcggtaagcgtgatgtcttgccctttcagttcgctttgccatacatcgatagtattaacggcgctcaaattcagctctttgccggcagaaaggataccttgacccagcacgatgcggtcttcggcgatagcggtgatgttgcctaccgcgttgatggcatcggtattgacgatattagccgcatgcaggagtacattctttgccctgatagtttccgggcgcccagccgtattgatgtcgtttaattggctttcatggggcatcaccgttctgatttcgatctgattcttgaagtctgcagtcagattgccatcagcgaccataccgccatcaattataccgtcataactccaacggaaagctcgctctccggtatcgacataacttaatggggggtaaggccatcccagcttttcatattggatgtaagcttccgtatctggtttaaatttgttgaagcgttcttttgtaccaaaggcgtggttgatggaactgaaggtattacctgtaaggatcatatctcctttagccttcagttggctggcatcattccacaatgagccagcattaatgtagctgtttttgccagacgctataatggcaggagaagaattagaggtaacgcgggttcgaactcgctcatcgagtatccaattagctaagtgccgatttgcataagtacattcctccgatgtcgtgcaaggtagcagccatttctcccacttcgacatgtcttctttataaagatcttgtcggttttttatatctccgtttttatacgcattgaatacgctaccaaataatcgcattccttcttgatcaacaggctctatttggtcagaaatcgccaatgtctgccgcacgttatcaagcttgttggtacgaataaccaaatcgccactattggtctgaatgcgcgcggagcgattttctatctgtttagatttattcccctgagcatctttctggatccaaagattattgttgctatgcaatgcggtgttgtcaccatcacgtaatgccacattgcgtatcgtatcggcaaacacccgcatatcgcgatgtgccgtaacattaccgttgttattaagcgtatcagcggccatcgtcacgtcacgttccccacgaaccttcacgcccgatgagatatgaatttctctggcgctggcgttcaagtctgtcgcggcgtgtgtattgcccaactcaatcatcccgttaacgctcagcgtaatatcccgctgtttgctggtgaggtctttcaggttcacccctactccatcctcattggccaccaggcggattttgttggcgtacatgccgcccagcgccttggtatccacggccagttggggcttagcgccttcaccggcgatcggtttgatgctgccgtccttgaagctgatgcggttggcgccctgggtcagcgacagattttgtgcattgattttgccgttcagctcggtggcgcggctgatgatatcgacgtagtcggcgccgctaccgtccagccctttaccgccgatggtgacaccgccttttttcacctccagcgcttccagcgcgccctgcttgtcgaactgcggtttgccggtggtcagcgtcacgcccggcgcattgataaagccgcagccgtcgcaggtgatgccattcgggttagcgatcatcacgttggccttgttgccgaatacctcgagcttgccctgcagctcggaacgactgccgccgatcacctcattgatgatcaactccgccggttttcccttcaggtaggtgttgccctgcgcgctgtagatctccacgcccagctgcgttttgccgccgtgcgtggcgttattcaacacggcgccctgtggcccaacgttgaaatctttataggtgttgtgcgagatgcccgcaccgttcggcgtggcgatattcaccaccggtacgtcgcccggcttgataaccacctgcgtattgccgttagcggcggtgataccggcagcgaacgccgggtgcaacggttggaaagccgtcaggtagatcagcaaatagctggcgccccgcgccaacggagggttgagcttatccatattcattccttcgaaaggatgttgttgtgaacgccgagggcgttcctgctgtgtgctggcgttataacgtgacggtggcttgccagtaggccacccaacgatccggttgcaggctgtctgggtgcgtcagcggtttaccgacggtgatcgcctgattaaaccaacggccgcttagcgtggcgcccagcgccgcaccgacgacgctgccgccgtctatctgcccggcgcgcccctgcagccagccggcgtctaacgcgccggtcaaagagagctcccccagtcccggcaaggtctgccattgccagttgagttcattgcgccagtaggcgccgcgattaccggtcaggtactgctctttaaagccgcgcaccgagtattgcccgccgatggaaatgcgctcgccggcatacaggttgtctgcgctggtttgcccgtaggccgaggtcaggtagtaaagagagggggcgagcggatagaaataactggcgctgaggccaagcttacggaactcgctgcgcggcgccccgtttcgctcaggatcgtcggcggtggcgcccagcatgcgcagcccacggcttatcgttgggttcagcgtcatataaccgccgcccgtgaccgtactgtaattgaggcccaggctggcgatgctgagcgtcgggctgctgacgctcaaccgttcccccgccagcttattttccgtggtgcgccgcgccagcccgatatccacagccagcttacgtttgccatcccgcagcaacgtgcggttggcgcccaaacgctgggtctggttattgccctgatagcggtaagcggcaccgttgaacggcacctgctggaaaaaatcgttccaggcatactgatagctgaacagccaatagccatagggtaaggtgacgctgccgttcaggctgcggctgcgatgatgcgggctgaaatcgttattgcgcgctgcggaaagcgaccattgatccgcaagacgcagcggattatccagcgagaaggcggcgttcatctgtccggtgccggtgcttttctggccgctgttatccgcgccgaaagaaaaagaaaccggcgcgcgcgtggcgccacgcagcaaaaccacgttggaaaagccgggttgctcgccaggttggatatcgatagtcacctgttgcgagggcaggcggttgagctgctccatgccctgctcaatatcgcgcagattcaatacgccaccaaccagaccggggaacgccatcttcaacgctggcgtctgctcgccgttttgcgtgatggactcgattcgcccctcgctggcgctgacgatcaacacgccgcgggagatatcctgctcctgcagccaggcctgtgaggtgacatagccgcgttgcagataagcgttggtggtttcgcgcaccagacggttgatgtgctccagcgtcaggcagcgcccctgatacgggcgcgccaggctttcttttaccgaccaggaaagatgctcggcgccctcaaaaacaatctgccgcaccggctggcaaaccgctcctgcggcggccggcacaggcagcggtaacgcctgcaattcaacgttattttgcagcgcctcgcgctgttgctgggcctgttccagcaacgttttctgctgttgggtaatgctgtcgcgatcggcagggctggtgatttccgcgcaccacgcagagctgcaaaacaccaaaagcacaggccaaaccctcggcttccatgcacacatttaaatacatccatttacattaatttacacaccttagcggagtatatacattttatgccaccaatcaataataatgagaattatttttgtttgatctaaatcacaacgcggaaaaaatgcgcatatgccacagctactgcagcttattacccagagcgcatttaattaatattaaaattaaaaaaaagaataataaaaacaaataaattcaatataaaaataacacgctcaatatcgacaaaaacaaacaagcagagtttacaaagttaattcacccttttatcttggtagttctattcgcataattaattcataaaaaacatagttattagttaatcaataaagaaaaaatatcgggaataatctcatgtttaaccgtgatatagaactgtttattcgtgattacgttaatgatattaaggctggcagcgctgcgctgtttgccggcgccgggctgtccatccccgccggtttcgtcagctggaaagagcttatcggcgatatcgcttatgaactggagctggatatcgaaaaagagagcgatcttatttccctggcgcagtatcacctcaatgaaaaaggcaacagacataagataaatcaaaaaatcattacagagttcgctgaacaggcggaagaaacagaaaaccaccggattatcgccagattaccgatagcgtcactttggaccactaactacgacgacctgattgaaaaaagctatgcccgttataatcgcgtatgcgacgttaaaaccacaccggaaagcctgaccaataacattcacaaacgtgatgttgttttatataaaatgcatggtgactatagaaatcccaaccaggcgattatcacccgcgaacaatacgaaacttactcccgaacacaccttccctttatcaacatgctgatggcggaactgaccgctaaaacgttcctgtttatcggtttcagcttcgaagatcccaatctgcagtatgtgttgagccgcctctatgcacagtatgccgaagggaaaagaaatcactactgcattatgcggcgcgttcagctcggcgacagcggcagtgaagatcaggcgtcctgtgactacaacagccgtaaacaaagcttgatgatcaacgatctgcgccgttacggcattcaaacgctgctggtggatgactatcggcaaatcaccgacctgctgtatgccatcgaaacgcagtttaagaaaagcacggtgtttatctccggcagcgccgacaactaccatccttatgcccgtgaagagtccatccagttcatacatcgtctggcgcgcctgcttatccgcaaacagcaccgcatcgtcaacggcttcggctggggcgtaggcacggcggtgatcaacggcgcactggaagccatttacgacagccaagggaaaatcagcgaaagccaactggtgctgcgtccgttcccccaattcgccagcggcggcattaccctaccggcactttggcacgaataccgtcagaacatgatttcgctcagcggcatcgcaatctttttgttcggcaacaaacgcaacgccgaaggcgaatacgtgctggccgacggtttattgaaagagttccagatcgccacggaacaaggctgcgtctgcatacctatcggttgtactggcagcgcatccgccgagatctaccgaaaaatcaaggaggaaatgaaagaaaccctctaccaccgccaccccgccgccatgaatctgctggatcagcttaacgaaccgggcagcctggcggagaagaaaaaatgcctgttggcacttatcgatatcattactaaggataacccccgatgaccagaaaatgtttttacagtttccattatgagccggacaactggcgcgcttctcagatacgtgaaatgggcacgctggaaggtaaccggccggccacggataatgattgggaggaggtgaaaaaaggcggcgataaagccattgccgattggatcaaaagccagttggacaatcgcagttgcgccgtgattctcgccggtaaagataccgctaatcgcaaatggattaatttcgaaatctgcgaggcctggaaaaaaggcatgggcgtgctggtggtgtatatccacaatttgaaagacagcgccggcgaccaaaccacgaaaggtaaaaacccgttggatcacatcaagctgggtgacacaaaactctccgctatcgccaaagcctatgatccgccttacctgaccagcaccaatgtctataaccacatcaaagaaaatctggctgagtgggtagaagaagcgatccgcatccgcgcaaattactgatgcccctgatagacaaaaggctgcatgttgatgcagcctttcgtttgtttatagcccaaacgcctcacccataccgcccagtaatataatcctcggtgcggcgctggcgcggcgaggtaaaaatcgcgtcggtatcgttgtattccaccagccgcccctgatgaataaaggcggtgtagtcggagacgcgcgccgcctgctgcatattgtgcgtcaccagcaccacgctatagcgctgcttgagtgcggaaatcagctcttcgatggtcagcgtggagatcggatccagcgccgaggtcggctcgtcgagcagcaacacctccggctcgatggcgatggcgcgcgcgatcaccaggcgctgctgctggccgctggacaagcggaacgcgttttcgcgcagccggtccttcacctcatgccacagcgcggcggcgcgcagcgaacgctccaccgcctcatccagcaaacgccggtcgcgcacgccctgcagccgcaggccgtacaccacgttttcatagatcgatttcgggaacgggttcggccgctggaacaccatgcccacccgccgccgcagcgccgccacgtcgatctgcgcgccggagatcgccgcgccgttcagctgcagttcgccctcgatacggcagttgtccaccagatcgttcatgcggttgaaacagcgcagcagcgtcgatttaccgcagcccgaggggccaatcaaagccgtcacccggtgcttcgggatacgcagcgaaatatcatgcagcacctgtttgtcgccataaaacaggttcaggccgttgaccgccagcgcggtctgttcatcgtcgagatgctggacatccagccggggcaaactgcctggcgtcatcaaacccattacgcactccccaaaaatagcgtcattgttactgcgaccatgctcggtaccgctccctcaacgaatggcggatacccatcgccgccagattcaaactcaccacgatcgtcaccagcaggaaggcggtggcgaacaccagcggccgcgccgcctctacgctcgggctctggaatgccatatcgtagatctggaagctcaaatgcatgaacttccgctccaggtgcagatacgggaaaatctcgtccaccggcagcaccggcaccgatttcacgacccccaccagcatcagcggcgccgtctcaccggcggcgcgcgccaccgccaggatcaggccggtcatcatcgccggcgccgccatcggcagcacgatgcgccacaacgtctcggcccggctggcgcccagcgccatcgagccctgccgcagcgaggcgggaatgcgcgacagcccttcctcggtggcgacgatcaccaccggcagcgtcagcagcgccaacgtcagcgccgcccacagcacgccgggcgtaccgaaggtcgggttgggcaaggactcgggatagaacagctgatcgagcgtgccgccaatcatgtaaacaaagaagccgaggccaaaaacgccatagacgatcgagggcacgccggccaggttgaccaccgcgatgcggatcacccgcgtcagcagattgttgccagcatattcgtgcagatataccgccgcaattacgccaaacggcatcaccacgatcgacatcaggatcaccatcaacaccgtgccgaaaatggccgggaacaccccgccttcggtattcgcttcgcgcgggctgtcggtgaggaacttcttcacctgctcgccccagtgtgccagcttctcggtggtgttcatggcgttcgggtaccaggcatcgcgcacctggctgagcggaatggtcaacgtctgcccgtgcatgtcgcgcagcagcaacgcatcgcgctggcgatcgcggttcagccccgccagacgttcggacaacagctgatactgccgctgcagttccagccgttcggccttgatggcgtcctgtgcgcgggcgtccagcttatcgtcgcgctgcaggcgcttttcccgcagccgcagcgcgtcaaactgctgattgatgcgcgccatgtcgcggaattgaatgtcgtgcgcctggcgcgagagcgcggcgatttgcggcaggcgctgctgcaacgcctgccccagattgcggccagtcagcggttgcccgtcttccagcagccccgccagataaccgtaagcggtgccgtggctgtcgcgttccagcaccagcaggctgcgcggcgtgctttggctgtggacatcgctggccagcaaggtgcggaaatcctgcccctcgcgctcgcggttgccgaccttaatcagatagcgttcgacgctctgcgcctcgcccggcggcgtaacgcccgcctcggccagctggcgccgggaaatgctttgctgctggtacagctcaccgatcaccgtcaccggtccggcgccgttctgattgagttcgaactgataaaccgggctcggccagaaatagcgcatcccctgcccggccagcagcaacagaatgccgatcagcgccagcaggctgacggccaccgaaccggcggtcagccatatccacggcgacccgctcttcacccagttcttcatggcgcctcctgattcggcgtgtagcgcttgcgcagccgcaggcgcaccgcctccgccagcgtgttgaacacgaaggtgaagacaaacagcaccagcgcggtcaggaacagcacgcggtaatggctgctgccggagaccgcctccggcatttcaatggcgatgttggccgccagcgcgcgcagcccctggaacaggctgccgtcgataatcggcgtgttgccggtagccatcagcacgatcatggtttcccccaccgcgcggccaaagccgatcatcagcgcggagaaaatgccggcgctggcggatggcagcaccaccttgatcaccgtctgccactgggtagcgcccagcgccaaagaaccctggctcagggtcgccggcacgctgaacagtgcgtcctccgccagcgagaagatgatcggcaccagcgcgaagcccatcgccacacctaccaccagcgcattgcgctggtcataattatcccccagccagaaatgcagcggctcaccgaacaacgccacctccagccgcggccccaggttgagcgccagccacaccgtcaacgccagcagcggcagcagcaacagcagatcgacgcccggccggcagcgcggcataaagcgatgggtcaacgcgccgcacagcagcaccgccgccgccagcagcagcggcaacgccagcaccgccaacagatactgctcgatgatcggcgccagccaaatgccggccaccagcccgatcaccaccgtcggcagcgcgcccatcacttcgatagccggtttgatcacccgccgcagccccggcgtcataaagtaagcggtatagatggcgccggccaaggccagcgggatggcgaacagcatcgcgtaagccgccgccttaaaggtgccgaagatcaccggcatcaggctgaatttgggttggtaactgtcttcgccggaggtggactgccagacataggccggctgcgggtagttctcataccacaccttgccccacaacgaacgccaggtaacgtccggataagggttgtcgagcgcatagcgctgccagccctgcgcgctctccagcagcaggccatcgccgcgcggcgcgaacgccatctgccgcacctcggcgcccaaacgggtattcagcagcggctgcggttgaatggcggagaacagcgagaagccgccatcgggccgcagggtggcgaacacccggcggtaaggctcagccaccgtcagctcctgcccgtcggcgccgtggtcgaaatgctgcaccggcgtcagacgccagcgccgatctttttccacctcgaaccactcgcgcagattgccgtcggcgcccttgatcagcagcgcgctgccgccgggcagcgccgtcatctgatacggggcgtgttcgccaagggtacgcgtttcacgcagctgcagctgtgcgccgtcgatctgataacgcgccagccggttgccggtcagcagataaagctggcggccatccggcgtcagcaccagctgctccccgtcgtgctccagcggccgctcgctgaactgcggcggccggtcggggctgaagcggccgaacaccagccgccgatcgtcggtcactccggccagcagatactgcccgcgatgcgcatccgccagcgacagcagcttcagcggcttgcgctgtggatccagcgccaatggctgctgcccgagcgggaactgccactgcggccggccgttttcagccgtggcgaaatccgcgcgcgccaccacaaaccggccgtcagcctgcgccagcgcaaacagatcgcgctcgccggcggcctgcgcgagcagcgtcggtttggccaacagcgtctgctgcgccagcggcatctgggcctggccgctcggcgccggcgtcagacgataaaattgccccgcgccctgcgcgtcgatgcgataaccgacgcgctgctgcacgtccatgcccagcgccagcgccggggccgataccgtgaacggcagcggctgcgcctggccgagcgaggccggtttgaacaacggcagcaccgcaaacagcagataaacgaagatcagcatcaacgtcatcagcaccatcagcccgctggcggtcactgccgcctgcacgccgcggtcgatgcgcccgcgcatgcgatctcggggatgttgattggccgtcgtctgtgtcatgtgtctcgctgtcgctgatgtaatcgggcttgcgccgtaagataaccgggcatcttatgtcagttttatgacgtttgcatgacaaagttacccgccataactcaggttttttacactgccatcagacaatatgaatttgatatattgctgaaaaatgaccataaacacgctttataacgccaagaataagcctgctaaccgtcatttcatgctgatcgtttcactgccgggcatcccgccgcggggaaaatttattgccgccgaaaaacgccgcgcgccaacgcaatggatatgttggactttcctgtcaatctctcgcaataatgatgaaggacactagagcggcatccgggcgctgcgtcccggatcctattctaaatttgaactggagtggcaatgggtcaggaaaagctctacatcgaaaaagaactaagctggttatcctttaatgagcgcgtgttgcaggaagccgcagataagagcaatcccctgattgaacgtatgcgttttctgggcatttactccaacaacctcgacgagttctataaagtccgcttcgccgatctcaaacggcgcatcctgatcagcgaagagcaaggctccgccggttcctcacgccatctgctgaaaaagatccaggccaaggtgctgaaaaccgatcaggagttcgacggtctgtacaacgatctgctgctggaaatggcgcgcaaccagatcttcctgatcaacgaacgccaggtgtccgagaaccagcaaatctggctgcggcaatatttcaaacagcacctgcgccagcacatcacgccgatcctgatcaaccacgacaccaacctggtgcagttcctgaaagacgattacacctatctggcggtggagatcatccgcggcgcgcgcatcgactatgcgctgctggagatcccgtccgacaaggtgccgcgcttcgtcaatctgccgccggaagcgccgcgccgccgtaagccgatgatcctgctcgacaacatcctgcgttactgcctggacgatatcttcaagggcttctttgactacgacgcgctcaacgcctattcgatgaagatgacccgtgacgccgaatacgatctggtcaccgaaatggaatccagcctgctggaactgatgtcctccagcctgaaacagcgcctcaccgccgagccggtgcgcttcgtttatcagcgcgacatgccgaacgagatggtagagctgctgcgcggcaagctgggcatctccaactacgattcggtgatcgccggcggccgttaccacaactttaaagatttcatcagcttcccgaacgtcggcaaggccaacctggtcaacaagccgctgccgcgcctgcgccacatctggttcgacggtttccgcaacggcttcgacgccattcgcgaaaaggacgtgctgctctactacccgtaccacacctttgaacacgtgctggagctgctgcgccaggcgtcgttcgatccgagcgtgttggcgatcaaaatcaacatctaccgggtggcgaaagactcgcgcatcatcgaatcgatgatccacgccgcgcacaatggcaaaaaagtcacggtggtggtcgagctgcaggcgcgcttcgacgaagaggccaacatccactgggcgaagcgcctgaccgaggccggcgtgcacgtgatcttctcggcgccggggctgaaaatccatgccaaactgttcctgatttcacgccgtgaaggcgatgaaattgtgcgctatgctcatatcggtaccggcaactttaacgaaaaaaccgcgcgcatctacaccgactattcgctgttgaccgccgactcgcgcatcaccaacgaggtacgccgggtattcaactttatcgagaacccctaccgcccggtcaccttcgataacctgatggtgtcgccgcagaactcgcgcctgaagctgtatgagctgatcgacaacgaaatcgccaacgcccaggccggggaacaggccggcattatgttgaaaataaataatctggtggataaagggctggtagatcggttatataccgcgtccggcgccggcgtgaagatccgtctgctggtgcggggcatgtgttccctgattcccaacctgccggggatcagcgacaatattcaggtgatcagcatcgtcgatcgctttttggaacacgatcgggtttacgttttcgacaacaaaggtgacaaacgggtgtatctgtcctccgccgactggatgacccgcaacatagattaccgtatcgaagtggcggtatcgctgctggatccggcgctgaaacagcgcgttctggacattctggagatcctgttcagcgatacggtcaaggcccgttatgtggataaagaactgagcaaccagtacgtgccgcgcggcaaccgccgcaaagtgcgcgcccaggtggctatttacgagtatttaaaagctctggaacaaccaggacagtaggccagcaactatgccgctaaaaaacactgcaacgaacaaaccgcaggaaatcgccgccatcgacctcgggtcgaacagtttccacatggtgatcgcccgcgtcgtcaacggcgccttacaggtattgggccgtttaaaacagcgggtgcacctcgccgacggattggacagcaacaacgtactcagtgaagaggcgatagaacgcggcctggcctgcctggcgctgtttgccgaacggctgcagggcttcccggcggataacgtcaccatcgtcgggacccacaccctgcgccaggcggtgaacgccgaagtgttcctcaagcgcgccgccaaagtgatcccctacccgatcgaaatcatcgccggccaggaagaagcgcgtctgatcttcatgggcgtggaacacacccagccggagaaaggccgcaagctggtgatcgacatcggcggcggctccaccgagctggtgatcggcgaagacttcgagccgctgctggcggaaagccgccgcatgggctgcgtcagcttcgcccagctgttcttccccggcggcgagatcagcaaaaacaacttccgccgcgcgcggctggctgcggcgcagaagctggaaacgctggcctggcagtaccgcattcagggctggcagtatgcgctgggcgcctcgggcaccatcaaggccgcccacgaagtgctggtggcgatgggcgaaaaagacggtctgatcaccctggaacgcctggaaatgctcgccgaacaggtgctgcagttcaaaagcttcggctcactgagcctgccggggctatcggaagatcgccaatcggtgttcgtgccggggctggctattctgtgcggcgtgttcgatgcgctggcgatccgcgatctgcgcctgtctgacggtgcgttgcgcgaaggcgtgctgtatgaaatggaaggccgcttccgccaccaggacatccgcagccgcaccgccaaaagcctggccgatcactacaacatcgaccgcgaacaggccaagcgggtgctggaaaccaccgaactgctctattcgcagtggatggcgcaaaacaccaagctggtgcatccgcaattggaagccctgctgaaatgggccgccatgctgcacgaagtggggctgagcatcaaccacagcggcatgcatcgccattcggcctacattctgcaaaactccaacctgcctggcttcaaccaggaacagcagctgctgttggcggcgctggtgcgtttccaccgcaaggcgatcaagctggaagagctgccgcgcctcaacctgttcaaaaagaaacactacctgccgctgatccaactgctgcgtctgagcaccctgctcaacaaccagcgccagtcgaccaccacgccggaaacgctgcgcctgaccaccgacgacaaccactggacgctgcgcttcccggccggctacctggcgcaaaacaacctggtgcagctggacttcgagcgcgagcaggcctactggaacgacgtcgtcggctggaagctgctgatcgacgaagaaggctcgcaagacgaacagcgctccgcctgatcccccgccccctgccagccagggggtttttctttccgccctcgctccgccaacctaaacgaaaccctaatacgccgcgccgctcgccggaaaaaaatggacaacttttgtcatcagcgcctaaaatccggttacaaattctcgagcgaataacacaggacaccggcataccgggtgatatatgcgcaagaaaaccaccggacagatgacgaagatagtgttgtttatcagctttatcattttagtcggccgactgctgtacgccgccgtggtggcggtgcctcatcatcaggaaaaaaaacaggccgctgcgcaaaacgccgccgaagtcagcgcgccgcaacaggacgcctcctctgaataaccgccgcgccccgtccgtttcataaaaatgactccggcactcgctatgctctatcttttaatgagcctgcgtcaggaacgccgagcgcccgttaaggaacaccatgtcagccgcaacccataacgtcaaaaaagtcgctgaacaccgccagcgcattctcactctgctgttgaacaataaggaattggtcgacggcattctcggccggccaggggatgaacacgccctcagccaaagcgaactgctgaaccaaacggcggaaatcaccggcctgctggacgacatgcacgccgccgacctggcggacctgctggaggcgctgccgcaggacgaacgtatggcgctgtggcggctggtgggcaacagcaagcgcggccagacgctggtggaagtcgccgaaccggtctgggacagcctgatcgaagaaatgagcgacaaagacctgctcaaagcgatcaaaacgctggacgtggacgaacaggcctacctggcgcaatacctgccgcgtaacctgatgggccggttgctgacctcgctggagccggagcagcgcgcccaggtgcgcgagatgagccagtacgccaaagacagcgtcggctggatgatggatttcgaactggtgacggtgcggccggacgtcacgctcggcgcggtgcaccgttttttgcgcatgcgcaaaaccattcccgacgccaccgataaactgttcgtcaccgatcgcaaaaacaccctgctgggcgaactgccgctcaccgcggtgctgctgaacgacccggagatcccggtacgcgaagtgatggacagcgatcccgccacctttcagcctgaggacaaggccgatgaagcggccggcgcattcgaacgttacgacctgatcagcgccccggtggttgacgccaagggcaaactgatgggccgcctgaccatcgaagagatcgtcgacgccgtcaacgaagagagcgacaccaacctgcgccgcatgggcggtttgagcccggaagaagacgtgttcgccccggtcagcaaggcggttaaaacccgctgggcctggctggcgatcaacctctgcaccgcgtttgtcgcctcgcgggtgatcggcctgttcgagcacaccatttcccagctggtggcgctggcggcgctgatgccgatcgtcgccggcatcggcggcaacaccggcaaccagaccatcaccatgatcgtgcgcgcgctggcgctgcaccagatcgaagtcggcaacatctcgcgcctgatgctcagagagctgggcgtcgccatcatcaacggcgtggtgtggggcggcatcatgggcgtgatcacctggctgctgtacggcgacgcggcgatgggcggcgtgatgacgctggcgatgctgctcaacctgctgctggcggcgctgatgggcgtggtgatcccgatgaccatgctcaaactgggccgcgatccggcggtcggctcgagcgtgctcatcaccgcgctgaccgataccggcggctttttcatcttcctcggcctcgccaccctgttcctgctgtaagacgctcaaagccggccccgcgccggctttttcgtcattctgtcgccgggtttgcgctaacgcagtaaagtcggccctcccgataggttttcctcccgcgctgtactaccctttttcaataaatcatcttgattcatccacgtcatgaatccaatcacaggcagaggtcatcggtaaggatgtctatggatatcagcgcgccgaacgcgttcggcacacacaaaggcgttatgctgacacattctctgttcgtggcgctggcgacatttttgctcgccttgctgagcctgtcgttatccagtgaggctcatcacttcacgccgctgtggttcccgaccgccgccgcgatcgccgtgctgtatcgccatcctccgcgtcattggggtttgccgctgctggccagcggcacaggcatcgtactcgccagcttcctgctgttcggcttcagcgccattccggtcaagctggccgccatcaacctgctggaagcggcagtgtgcgctctgctgctgcgccgcacgctgccggcgatcgatccgctgagcgatctgggctgttggctgcgcttcgtggtctgcgcggtgatctttaccccgttgttcagcgcgctgctggccgccggactaacccccacgccggacctgacgttttggcaatcgttcggcacctggttcatctctgaagcgataggggtgctgtcgctggcgccgctcgggctcacctatcaccgccgtctgttggccgggctgaatccgtatccgctgctgttgaccctgatgggctcgctggccttcagctatctggcgctgacgcatctgcccttcccctttaccttcgtcatcctgccgctgctgtgggcggctatcgccctgtcgcgcttcgaaaccttcaccgtctgtttctgcactctcctgctgatcaccgtcctgctgtcgctgggtctgctgcaccttcagtcttcccagcacactttcctgggcgaactcggcctctatctgccgatgttgctgatcctgatcccggcgcacgccatggcgatggtgatgcacaccttccgggtggaaaagcaacatatcgtcgagagcgaaagccgctttcgcagcgcgctggagtattccgccatcggcatggcgctggtgtcgccggagggcaaatggctgcaggtcaatcaggcgctgtgcaagctgctcggctatccgcccgaaagactttatcgcctgacctttcaagagatcacccacccggacgatctgaacgccgacctgacccaactgcacgaactgctcgacggccatatcagcagctacaccatggagaagcgctatatccgcagcgacgggcagacggtctgggcgctgctggcggtctcgctggtgcgcgacggcgaaggccggccgttgtacttcatctctcaggtggaggatatcagcgaccttaagcgcagcgaggcggagaacaaccggttggtggagcgcatcacgctggccaaccaggtgggcggcgtcggcatctgggaatgggtgatgagccaggaaaacttcacctgggatcagcgcatgttcgaactctacgatctcccccccgaccaaacgccgacgctggcgttgtggcgcaccctgctggtgccggaagatcgcgagcgcaccgatcgcgagctggccgagatcctggcgcagccgcgaccgttcgtcatggaatttcgcatcactacgcgcagcggcaaagtgcgccatatccgaggccagggcaacgtgatcctcgacgatcagggccggccgctgcgcctgatcggcaccaatatcgacatgaccgagctcaagagcctcgccgaggcgctgcacgaagagaaagagcgcctgcacatcaccctcgacgccatcggcgaaggggtgatctccaccgacagccacctgcgcatcacctttatgaatccggtggcggaacagatgtgcggctggccactcgacctggcgatcggtatgcccgtcgccggcgtggtgcgcctgaccaacggcaaagacggcccggaaatcgaaaacctcacgcaatacccacggcaatggccggcggattatgcgctggtgctgcacagccgcgacgggcgttatttcgacgtacagcagtcggtctcaccgctgaaaaccctcgacggggaaaccatgggcgcggtgatggtgctgcaggacgtcaccgcctcgcgcgagctgatgaaaaaactcagctacagcgcctcgcacgatgcgctgaccggattgccgaaccgcacccgcttcgagaaacagctgaaagcggcgatcgtcgccggcggggaaccgtcgtcgtcgcattcgctggtgttcctcgatctggatcggttcaaggcggtgaacgacaccgccggccatgcggcgggcgatgccctgctgcgggatatcgcccagctgatgcggcaccaactgcgcggcagcgactgcctggcgcgtttgggcggcgacgagttcggtctgatcctgtacgactgccggctggaacaggccaaatcgctggtgcagcaagtggttaatcaaatcagccagcacccgttctattgggaagggaagatttatcgcgtcggcgccagcgccggcatcacgcgcatcagtgccgacgccaaaagcagcgaactgttggcgcaggccgatatcgcctgctataccgccaagcaccaggggcgcggccaggtttatctgtacgaaacgcggcagaaacagctgctggagcggcaacacgaggtactgagccagcaggaagtgcagacgatcatcagcgaggggcaactgcggctgctgactcacgcggtcgcgccgccggcgacgccgctgtcggccgcgtttcaccaggtgaagctgcaggtgatggcgccggacgagcgcccgctgtcgcacgaggcgttcatcaccgccgcgcagctgtacggcctgatgccggacatcgaccgctggacggcggcgcaactgctggtgaaatatgccgacgacatcaaacgcaaagggctgtcgctcgcgctgccgctggccatcgacagcctgctgagcgccgacttccagcgctacctgacggaaacggtgcgcgcttcctcgctgccgccgcaggcgctgctgttcagcgtcgatgaggccgcgatactggagcacgccgcacagtgtcgggcatttctccgcgaactgcagcagcagggctgccggctgatcgtcaacggcttcggacataacatcaatgcgttcgatgaactcagcgatcagaagatcgacatcattcgcatcgatgagcgctttatcaccaacgtgcactgcaaccagatggacgagctgatggtctcgatgctcaacggcgcggcgcatcgcattaaagcgcagaccttcgccgggccggctcaccagccggtgacgctgcaggcgctgcgcgacatcggcgtcgatctggcggacggcgaccaggtggcgctggagcagccgctggcggtgttgctcagcgacggctatttcggcatccgttaaccttctcccccctctcaggcgccgtctcccaggcggcgcctcgcatctcgttcgttacatgatattaaccaagacaagattagtgatataaataacacctgaagcttaaacgattaagtaagatgaagcgcccatgcgactatcagcgtatccgttgattttcctcggcatgtgatggctcagggataagggactatggaaaagaaatggttttccgccagggaactgatgggtaaggcggggttgccttcaactccgcaaggggtcaatttgatggcccggcgtgaaggctgggtcagccgccgccgcagcggcgtacagggcaaagcgctggaataccatatcgacagtctgccgttcggcgcgcgcagcctgtcggcgttgcgcgaaaccgaccatccggattacgacgtcaaacgccaggatccgatacgggtctggatcgagtattactaccacctgacgccggccgagcgggaaaagctgctggcgttcctgatgcgcgagggcatgagccgcctgctgcagctgatcgacacccctcgctagctctgcgttcaactctcccctttcggcgcccagccgtcgttgtgccacagatgcagcgtggcgtaagagcgccacgggcgccaacgttcagcgtagcgttctatctggcgcggcgtcatgccgggaaaacgctgtttgatcaggtaatcgccggccaggaacacgtccggccacgaccaggcgcgcatcgcgatatagctggcggtccagctgccgatacccggcagcgcggtcagcgccttgatgccctgttcgatatccagcacgttgtcgagctgcagccgcccttcgcccagcgcgcgggcgatctcgatcagcgccgccgcgcgcttcagctgcaccccgagcgggcgcagttcttcgggctgcagctgcgccacccgttctgcggaggggaagacatgggtgatgccctcatgcggcgtcgccagggtttccccccagcgttcagccatccgcccggcgaaggtcgccgccatttttacgctgaccaactggcccagcaccgcccgcgccgcctgctcgaaactgttcacgcagcccggcaggcgcaatcccggcgcatcggccgccagcgagcccagcgcctcattgatgcggtccggcgcggcatccagatcaaacagcaggcgcacccggcgcaacacctccgtcgtcaccagactgagcgcaggcgcgatctctacccgaacccgattgcgcgcttcttccggctgcacgctgacccagccgcggtgttccgtgccgccctggctgacggcgatcgagcgcaggtagcggcgtccgtcgacccgctccacgccctgcacggcgcgcgcctgcaagaaattcagcatgcgctcccagtcatagggcggccgatagcccaggtgaaacaccagcccgctggcggcggcccgttcaccgcgcgcgccgccgctgcgcagcgctgacgggatcaggcggtagcgcgccttgaacagctcgttgaaacgccgcaggctgccgaatccggcggcgaacgccacctcgctgagcggcagatcggtgtccgccagcaggcgtttggcctgcagcagccgatgcgactgcgcgtaatcgatcggtgaggcgccaaactgttcggcgaaaatgcgcctcagatggcgatcggaaatgcccagccgcgccgccagcgcttcgcagctgtgttcagacagatacccctgctcgatgagctgcactgccacctgcgcatagcggttgcccagatcgatcagcgccagaccgggcgccagctccggccggcatttgaggcaggggcgaaatcccgccaactctgccgccgccgcgctcggataaaaggtgcagttttccagcttaggcgtgcgggcgctgcacaccgggcggcaataaatgccggtggaggaaacgccgacgaaaaaacggccgtcgaatttgcggtcacgcgcgcgcagcgcgtcgtacaacgcttgctgttgagtattcatggcaacgctcggggtcggttttttctgcattatggggctcggctggcgtgctgacgtgcggaattcggacattaagttaagcacgccgcagccgcgcccgctaaatttttcgacactcgcgcattggcgcattgcccgccggcctcgtctcgggtaaagtcgccccccttcattggcatggggacaaaaaagagatgtttattggattcgattacgggaccgccaactgttccgttgcagtgatgcgcgaccacggccccgagctgttgacgctggaaaacaacgcgccctatctgccttcgatgctgtgcgcgccgacccgcgaagcggtgagcgaatgcctgcaccgccattggcagatcccaaccggcagcgaagaaaaccagcagttgctgcgccgcgccatcagttacaaccgcgaagaagacattccggtcaacggcgacagcgtgctgttcggcctgcaggcgctggcgcactacatggaagatccggaagaggtgtacttcgtgcgctcgccgaaatccttcctcggcgccaacggcctgaagccgcagcagatcgcgctgttcgaagacctggtgtgcgccatgatgttccacatcaaacgccaggcggaaaatgtgctgcagaccggcatcgatcaggcggtgatcggccggccgatcaacttccagggcatcggcggcgacgaagccaaccggcaggcgcagggcattttgcagcgcgccgccgaacgcgccggtttcaaggagattgaattccagttcgagccggtggcggcggggctggacttcgaggcaacgctgagcgaagagcaaaccgtgctggtggtggacatcggcggcggtaccaccgactgctcagtgctgctgatggggccgcagtggcgcgaccgcgccgatcgccagcagagcctgctgggccacagcggctgccgggttggcggtaacgatctggacatcatgctggccttcaaacagctgatgccgctgttcggcctcggcggcgaaaccgcgaagggcatcgccctgccggcgctgccttactggaacgcggtggcgaccaacgacgtgccggcgcaaaacgacttctacagcgccgccaacggccgcgtgctgcgcgatctgatcctcgacgcggcggagccggaaaaggtgaaacgcctgctgaaagtgtaccagcagcgcctgagctaccgactggtgcgggcggccgaagagagtaagatagccctgtccggccaaacggccatcagcgcgctgctcaatttcgtgcaggccgatctggcggagagcatcagccaggatcagctcgccgacgccatctcgcagccgttgatgcgcatccaggagcaggtcagcgccgcattggccagcagccagaccgcgccgcaggtgatctacctgaccggcggcagcgcgcgttcaccgctgctgcgcgccgcgctgcaacagcagctgccgggcattccgatcgtcggcggcaacgacttcggctcggtcaccgccgggctggcgcgctgggcgcaaacgctgttccgttgacggcccaagggcgcctcgccgcgcctttgtttattggaggccctatcatgtccaccttgcttaccctcgacagcgccaggctgcggctgcgcccctggcgtgacagcgatctgccggccttcgccgcgcttaacgccgatccgcaggtgatgcgctatttcccggcgctgatgacggccgaggaaagccgcgcgcaggccgaacgcatccgcgccttcatgcaacaacacggctgggggctgtgggcggtggaagtgaaaggcggcgcgccttttatcggctttgtcgggctggcgcggccgggcgatgatctgccctgctccccctgcgtggagattggctggcggctggcggcggctcactggggcaacggctacgccgctgaggcggcgcgcgccgcgctggcgtgcgccttcgacacgctgcacctgccggaagtggtgtccttcaccgccgaagataaccagccgtcgcgccgggtgatgacgcgcatcggtatgcgcttcgacggtgaaatcttcctgcacccgcgcctgccggcgggccatccgctgcaacagcacgtcttgtaccggcttaaccggcaaacgtggcgcgaacgccacggcgattaatacagcgtatccttcagccgctgcggcagcgcgctgtcgtactcctcaccgtcgaagcgcgtttggctcaccgcggccaagatttggccggggctgggcagcgccgaacgttcgaggcggcggccctcttcccacaaccccgaacgcaagatcgcccggctgcactggaagaacaccgcctccacccgaatgcgcagcaccgaacgcggcagctggttgcggtgggcgaagcgctgcaacaccgccggcgccaccacgatctccgcccgcccgttaatccgcagcgtttcgccgatgccggggatcagcaacagcagcgccacccggttatcgtgcaggatattgcgcaggctatcgatgcgattattgccgcgccggtccggcaacagcagggttttctcgtcttcgatctggataaaaccggccggatcgccgcgcggggagacatccatgccgtccggcccgaccgtcgagagggcggcaaacggcgccgcctcgataaacggacggtacgccgggtggatatagctgacttctttaaaaaccgagggcgcggcaggtttgccgtaaagctgttccagcgccgcgaggtcgttgatgatatcgccagacattgcagtttcctgaataagtcatattgaccccttcagcatagagcaaaatcgccggcggctcttactcagcgctggcgtggttcagcgtctgaatgtcgtccgcatccagcgtcaggcgggtggcgctgaccaactcatccagctgcggcaacgaggtggcgctgacgatcggcgcggtgatgctcggacgcgcaatcagccaggccagcgagacctgcgccggagagctgccgtgcttgcccgccacctgatccagcgccgccagaatgcggaaaccgcgcgggttcaggtagcgttcgacgatgcgatcgccgcgctggcttttgccctcgtccgctttgctgcggtatttgccggtcaggaagccgctggccagcgcaaagaagttgatcaccccgagaccatggcgctgcgccacgccttccagctcggcttcatacccttcgcgcgcatacagattgtattccggctgcagggtttcgtagcgcgccaatccgttgctttcgctcacccgcagcgcttcttccaggcgatccgcctgatagttggaggcgccgatcgcccgcaccttgccggccttgatcagcgcatcgaacgccgccagcgtctcttccagcggcgtatcgcggtcatcgtcgtgcgactggtagagatcgatataatcggtttgcagacggcgcagcgaatcttccaccgcctgctgaatatagcgcggcgacagcccctgtttgccttcgcccatcggtttgcccaccttggtggcgatgatcacctggtcgcgcttgccgctcttcttcagccattcgccgatgacggtttccgattcgccgccccggttgcccggcgcccagctggaataaacgtcggcggtatcgataaagttgagctgattgtccaccagcgcatccagcagattgaacgaggtcgcttgatccgccgtccagccgaacacgttgccgccaaaggtcaacgccggcacctgaatgcccgaacggcccagttgtttcttgctcatcacaaaggctccatgggttaaatgatttgcctgttaattattagcgccaaatgcaggaaatcgttaaaacggattggctataagccggaataaatcacttataaacatagcacgcgcaaatcacccacttattaagacaatgctgacggttcctccatatttccttcatttttatgccgtcttcgctggctaaactagtatcctgtaaggagtgtcatttttgtggcaatgagtgcccgcgcccctgccttttggagagaattttcaccaccatgaatgcaaaaccccaacgtcgttccctgctgctgcgcctgctggctgcggcgattgcgatcatcgtcgccgttctggcctggcgccatttcagcgcagcccaaccgaccgccgggacgacgccgggcgcgcaccaggccgccggtaaaacgggagcgggccgcgcggcgggtggcagacgcggcgcgccgatgtcgccggtgcaggcggcgacagccacgcaacaaaccgtgccgcgctatctttccggcttgggcaccgccaccgccgccaataccgtgaccgtcaccagccgggtcgatggccaactgatggcgatccactttaccgaaggccagcaggtcaaagccggcgatctgctggcggagatcgatccccggccgttccaggtgcagctgacccaggctcaggggcagttggcaaaagatcaggccacgctggccaacgcccggcgcgatctggcgcgctatcagcagttggtgaaaaccaatctggtttcccgtcaggagctggatacgcaggcctcgctggtgcaacaaaccgaaggcgccatcaaagccgatcagggcgcggtcgacagcgccaaactgcagatcacctacagccgcatcactgcgccaatcgacggccgcgtcgggttgaaactggtcgacgtcggcaactacgtcaccagcggcagcaccaccggtctggtggtgatcacgcagacgcacccgatcgacgtggtgttcacgctgcccgaaggcaacatcgccgatctgctcaaggcgcaaaaagccgggccggtgagcgtcgaagcctgggatcgcaccaaccagaacaagctgacgaccggttcgctgctgagcctggacaaccaaattgataccgccaccggcaccatcaagctgaaagcgcgtttcgccaacgaagatgacgcgctgttccccaaccagttcgtcaacgcgcggctgcaggtggataccctgcacgatgcggtggtgatcccgaccgccgcgctgcagatgggcaacgaaggcaacttcgtctggacgctcagcgaagacaacaaggtcagcaaacatcgggtcaccgccggcgtgcaggacagccggcaggtggtgatcagcgccggcctcaacgccggcgatcgggtggtgaccgacggcatagatcgcctgaccgaaggcatgcaggtggaagtgctcgcgccgagcgacgcgcctgcgacgtcaaaagccaagcgcgaacctgacgttcagaggaagtcctgatgcaggtgatgcctcccaacgccggcggcggtccgtcccgcctgtttattctgcgcccggtcgccaccacgctgctgatggtggcgatattgctggcggggattatcggctatcgcgcgctgccggtatccgccctgccggaagtggactaccccaccatccaggtggtgacgctataccccggcgccagcccggacgtggtcacctccgccattaccgcgccgctggaacgccagttcggccagatgtccggcctgaagcaaatggcgtcgcaaagcgccggcggcgcctcggtggtgacgctgcaattccagctgacgctgccgctcgacgtcgcggagcaggaagtgcaggcggcgatcaacgccgccaccaacctgctgccgaacgatctgccctacccgccgatttatagcaaggttaaccccgccgatccgccgatcctgacgctggcagtgacctccaccgccatgccgatgacgcaggtggaagacatggtggaaacccgcgtggcgcaaaaaatttctcaggtgaccggcgtcggcctggtgaccctggccggcggccaacgcccggcggtgcgtgtaaaattgaacgccgcggcggtcgccgcctatggcctgaacagcgaaaccatccgcgccgccatcagcaacgccaacgtcaactcggcgaaaggcagcctggacggcccgacccgctcggtcaccctgtccgccaacgaccaaatgaaatccgccgacgactatcgccagctgatcgtcgcctatcagaacggcgcggcgatccgcctgcaggatatcgccaccatcgaacaaggggcggaaaacacccggctggcggcctgggccaaccagcagcaggcgatcgtgctgaacatccaacgccagcccggcgtcaacgtcatcaccaccgccgacagcatccgcgaaatgctgccgacgctgattaaaagcctgcccaagtcggtcgatgtcaaggtgctgaccgatcgcaccaccaccatccgcgcctcggtcagcgacgtgcagttcgagctgctgctggcagtcgcgctggtggtgatggtgatctacgtgttcctgcgcaacgtgccggcgaccattatccccagcgtggcggtgccgctttcgctggtgggcaccttcgccgccatgtacttcctcggcttctccatcaacaacctgacgctgatggcattaaccatcgccaccggtttcgtggtggatgacgccatcgtggtgatcgagaacatctcgcgctacatcgagaaaggggaaaaaccgctcgacgccgcgttgaaaggggccggcgagatcggcttcaccatcatctcgctgaccttctcgctggtggcggtgctgatcccgctgctgttcatgggcgacatcgtcggccgcctgttccgcgagttcgccgtcacgctggcggtagcgattttgatctccgccgtggtgtcgctgacgctgacgccgatgatgtgcgcgcgcatgctcagccacgaatcgctgcgcaagcagaaccgtttttccgccgcctccgaacgctttttcgagcgggtgatcgcgcgctacggccagtggctgaaaacggtgcttaaccatccctggctgacgctcggcgtggccgtgggcaccctggcgctgacggtgctgctgtacctgctgatcccgaaaggcttcttcccggtgcaggacaacggcatcattcagggcacgctggaggcgccgcagagcgtttcgttcagcaacatggccgagcgccagcagcaggtcgcggcgcagatcctcaaggatccggcggtggaaagcctgacctcgttcgtcggcgtcgacggcagcaacgccacgctcaacagcggccggctgcagatcaacctgaaaccgctgagcgaacgcagcgaccgcattccggcgatcatcagccgcctgcagcagcaaacggcgcagttccccggcgtgaagctgtacctgcagccggtgcaggatctgaccatcgatacccaggtcagccgcacccagtaccagttcaccctgcaggcgatgtcgctggacgatctcagcctgtgggtgccgcagctgatggatgagctgaaacaaaccccgcagctggcggacgtcaccagcgactggcaggatcaggggctggtggcctacgtcaacgtcgatcgcgattcggcctcccgtctcggcgtcaccatgagcgacgtggacaatgcgctgtacaacgcgttcggccaacgcctgatctccaccatctacacccaggccaaccaataccgcgtggtgctggagcacgacgtcagcgcgacaccggggctggcggcgctcaatgagatccgtctgagcggcaacgacggcgccgtagtgccgctgagcgccatcgccaaaatcgaagagcgcttcggcccgctgtcggtcaaccatctcgatcagttcccgtcggccaccgtttcgttcaacgtcgccgacggctactcgctcggcgaagcggtggacgcggtcacccaggcggaaaaaaatctcaacatgccaagggacatcaccacccaattccagggggcgaccctggccttccaggcggcgctcggcagcacgctgtggctgattttggcggcggtagtggcgatgtacatcgtgctgggcgtgctgtatgaaagtttcattcacccggtgaccatcctctccaccctgccgaccgccggggtcggcgcactgctcgcgctgatgatggccggcagcgagctggacgtgatcgccatcatcggcatcatcctgctgatcggcatcgtgaagaagaacgccatcatgatgatcgacttcgcgctggcggcggaacgcgagcagggcttatcgccgcgcgacgccatctatcaggcctgcctgctgcgttttaggccgatcctgatgaccacgctggcggccctgctcggcgcgctgccgctgatgctgagcaccggcgtcggcgcggagctgcggcatccgctcggcgtctgtatggtcggcggtttgatcatgagccagatcctgacgctgttcaccacgccggtgatctacctgctgtttgacaaactggcgcgcaacacgcatcgccagccggatacgcaggagctgccgtgaaattcttcgccctgttcattcaccggccggtggccaccaccctgctgacgctggccatcgccatcagcggcgcgatcggctttcgcctgctgccggtgtcgccgctgccgcaggtggattttccggtgatttcgatcagcgcgtcgctgccgggcgcctcgccggaaaccatggcgtcctcggtggcaacgccgctggagcgcgcgctgggccgcatcgccggggttaacgaaatgacctcgatgagctcgctcggcagtacccgggtcattttgcagttcgatctcgatcgcgatatcaacggcgccgcgcgcgacgtgcaggcggcgattaacgccgcgcaaagcctgctgccgaccggcatgccgagccgccccagctaccgcaaggtcaacccatccgacgcgccgatcatgatcctgacgctgacctcggacacctacagtcaggggcagctttacgatttcgcctccacccagctggcgcagaagatcagccagaccgagggcgtcggcgacgtttccgtcggcggcagctcgctgccggcggtgcgggtggagctgaacccttcggcgctgttcaatcagggcgtgtcgctggacaccgtacggcaggccatcgccaacgccaacgtgcgccgcccgcagggcgccgtggaaaacccgcagcagcgctggcagatccaggccaacgacgcgctgaaaaccgccgatgcttatcgtccgctgatcattcattacaacaacggttcggcggtgcgtttagccgacgtggccgaggtcaaagactcggtgcaagacgtgcgcaacgccgggatgaccgacgccaaaccggcgatcattctggccatcagccgcgcgccggacgccaacatcatcgaaaccgtcgatcgcattcgcgccgaactgcccgccctgcaggagaatatcccggcttcgattcaactcaacgtcgcgcaggatcgttcgccgaccatccgcgcgtcgctggccgaggtggagcagtcgctggcgatcgccatcgggctggtgatcctggtggtgttcatcttcctgcgctccgggcgcgccacgctgatcccggctgtcgccgtaccggtgtcgctgatcggctcgttcgccgccatgtatctgtgcgggttcagcctcaacaacctgtcgctgatggcgttgaccatcgccaccggttttgtggtggacgacgccatcgtggtgctggaaaacatttcccgccacgtcgaggccggcatgaaaccgatcaacgccgcgctgctgggcgcgcgggaggtcggtttcaccgtgctgtcgatgagcgtttcgctggtggcggtgtttatcccgctgctgctgatggaaggcctgcccggccggctattccgcgagttcgccgtcactctgtcggtgtcgatcgggctgtcgctgatcgtctcgctgacgctcacgccgatgatgtgcgcctacctgctgcgccaccagccgccgcgttcgcagcggcgggcgcgcggcttcggtaaaatgctgctggggctgcagcagggctacgggcgctcgctgaactgggtgctcggccactcgcgctgggtgctggcggtgttcctcgccaccgttgcgctcaacgtttggctgtatatcagcatcccgaaaaccttcttcccggaacaggataccgggcgtctgatgggctttatccaggccgaccaaagcatttcgttccaggcgatgcgcggcaaactggaagacttcatgaaaatcgtgcgcgaagatccggacgtggaaaacgtcaccggttttaccggcggttcgcgcaccaacagcggttcgatgttcatctcactgaaaccgctgtcggtacgcagcgacgacgcgcagaaagtgatcgcccgcctgcgcgcccgcctggccaaagaaccgggcgccagcctgtttctgatggcggtgcaggatatccgcgtcggcggccggcaggccaacgccagctatcaatatacgctgctggcggacgatctcgccgcgctgcgcgaatgggagccgaagatccgcaccgcactggccgcattgcccgagctggcggacgtcaactcggatcagcaggataaaggctcggagatggatctggtctacgatcgtgaaaccatggcgcgcctcggcatttcggtgtccgacgccaacaacctgttgaacaacgccttcggccagcgacagatttcgaccatctaccaaccgctcaaccaatacaaagtcgtgatggaagtggcgccgccctacacccaggacgtgagttcgctggacaaaatgttcatcatcaacaacgaaggcaaagcgataccgctctcctacttcgccagttggcggccggccaacgcgccgctgtcggtcaaccatcaggggctgtccgccgcctcgaccgtctcctttaacctgccggacggcggcagcctgtcggacgccaccgcggcggtcgagcgcaccatgactcagctcggcgtgccgtctacggtgcgcggcgcgttcgccggcaccgcccaggtgttccaggacaccctgaagtcgcagctgatcctgatcctggcggcgatcgccacggtgtacatcgtgctcggcgtgctatatgagagctatatccatccgctgaccatcctttccacgctgccttccgccggcgtgggggcgctgctggcgctcgagctgttcggcgcgccgttcagcctgatcgcgctgatcggcatcatgctgttgatcggcatcgtgaagaaaaacgccatcatgatggtcgacttcgcgctcgaggcgcagcgcaacggcggcatcagcgcccgcgaggcgattttccaggccagcctgctgcgtttccggccgatcatgatgaccacgctggcggcgttgttcggcgcgctgccgctggtgctgacccgcggcgacggcgcggagctgcgccagccgctcggcatcaccatcgccggcggcctggtgatgagccaactgctgacgctgtacaccaccccggtggtctacctttacttcgaccggctgcaggcgaagttccgccgcaacaagcaactggccccgctgccccattaatggccgaccgatgctgatgaaacacaccgccacggtacgctggcaactctggatagtggcattcggcttctttatgcagacgctggataccactatcgtcaacaccgccctgccctcgatggccgccagcctgggggagaacccgctgcgcatgcagtcggtgatcgtctcctatgtgctgacggtggcagtgacgctgccggccagcggctggctggcggacaagatcggcgtacagcgggtgtttttcagcgccatcgtgctgtttaccctcggctccctcctctgcgcccgctcggaaaccctgaacgagctgatcgcctcgcgcgtgattcagggcgtcggcggcgcgatgatggtgccggtcgggcgcctgacggtgatgaagatcgtgccgcgcgagcagtacatggcggcgatgactttcgtgacgctgccaggccagatcggcccgctgatggggccggcgctgggcggtttcctggtgcaatacgccagttggcactggattttcctgatcaatattccggtgggcatcgtgggcgccatcgccacgctgctgctgatgcccaactaccaaatgcagacccgccgcttcgatctcagcggctttatcctgctggcgatcggcatggcgtcgctgacgctggcgctcgacggccataaaggcatggggctgtccggcggcgccatcgccggtctggtggcgctgggcgcagcggcgctgttggggtatgtttggcatgcctacggcaatagccgcgccctgttctcgctgcggctgctgcgcaccccgacctacaaaatcgggctgctggccagcctgctggggcgcatcggcagcggcatgctgccgttcatgacgccgctgttcctgcaggtgggcatgggtttcacgccgttccacgccgggctgatgatgatcccgatgatcatcggcagcatgggcatgaaacgcatcgtggtgcaggtagtcaaccgcttcggctaccgcaacgtgctggtggccgccacgctgctgctggcgctggtcagcctgagcttcctgctggcggcgatgctcggctggctgtggctgctgccggtggtgctgttcttccaggggatgatcaactcactgcgcttctcggcgatgaacaccctgacgctgaaagatctgccggaccggctggccagcagcggcaacagtctgctgtcgatggtcatgcagctgtcgatgagcctcggcgtcagcgtcgccggcatcttgatcggcagcttcgcccatcaccaggtggtggccgatagcccggccatccacagcgcatttatttacagctacggctgtatggcgttgattatcgctctgcccgcgcttgccttcgcgcgcgtgccggccgatagcgcgcccaaccgcacgctgaccaaagagccgggtaccggctcaacgaggttgcaatgaggataggcattaccggaaaactgttcctggccattttcgctacctgcatgctggtgttgatcaccatgcattggggggtgcgcgtcagctttgagcgcggctttatcgattacatcaagagcagcaacgagcagcgcatcaacatgctgagcgaagcgctggaggaacagtacagccatcatggcaactggatattcctgcgcaacaacgatcaggtggtctaccagatcatgcgttcgttcgagcagaatagcgacagcagccacaatctgccgcccaaggggtggcgcacccagttttgggtggtggacagccagttcaatcgcttggtcgggcattcgggccccttgccgaaggaggggccgcgccacccgatccgctacaacaacgagatcgtcggctgggtgctcaccaccccggtcgagcgcctgacgcgcaataccgacatcaacttcgatcgccagcagcggcgcaccagctggattatcgtcgcgctctccaccctgttggcggcggcggtgacctggctgctgtcgcgcggcatgctggccccggtcaagcgcctggtggcgggcacccaccgcctggcggcgggcgatttcaccacccgcgtggcggtcagcagccaggatgaactgggcaggctggcgcacgacttcaaccagttggccacctcgctggaaaaaaacgagcagatgcgccgcgcctttatggccgacgtatcgcacgagctgcgcacgccgctggcagtgctgcgcggcgaactggaggcgctgcaggacggcgtgcgccagccgacgccggcgtcgctcagttcgctgcaggccgaggtatccaccctgaccaaactggtcgacgacctgcaccagctgtcgctctccgatctcggcgcgctggcctatcgcaaggcgtcggtggactgcgtgcacctggtgcagatcgccgtcgccgcctttcgcgaacgcttccgcgccaaagggctggagatcgtcacccatctgccggcccaggcgccgctgttcggcgatcccgatcgcctgaaccaactgttcaataacctgctggaaaacagcctgcgttacaccgacgccggcggccggttggagatcggcgtcgaactgcagccggggcggctgcttctttactggcaggacagcgcgccgggcatcagcgatcagcaactgacgcgcattttcgaacgtttctaccgggcggaaggttcacgcaaccgcgccagcggcggttccgggctggggttggcgatctgccacaacatcgtggaagcgcacgacgggaaaatccgcgccgagcattcgcctttaggcggcgtgcgcattacagtagaatttgctaccccgataaaaaataaggcgccctgatggacattcagaatcaacccctgcagatcatgattgttgaagatgagcccaagctgggccagctgctggtggattatctccaggcggcgggctacgccacccgctggctgaccaacggcaatgaggtggtgccgaccgtgcaccagcatccgccggcgctgatcttgctcgacctgatgttgccgggggccgacggcctgacggtgtgccgcgagctgcgccgcttcagcgacgtgcccatcgtgatggtgacggcgaaaattgaagagattgaccgcctgttggggctggagatcggcgccgacgattacatctgcaaaccctacagcccgcgcgaagtggtggcgcgggtgaaaaccatcctgcgccgcagctatcggccgcaggagaacgcgcgggaagatgacctgctgcacatcgatgaaccgcgcttccaggccagctatcaggggcagttgctggatctgacgccggcggagttccgcctgctgaaaacgctggccagccagccgggcaacgtgttttcacgcgagcagctgctgaacaacctgtacgacgactaccgggtggtcaccgaccgcaccatcgacagccacatcaaaaacctgcgccgcaagctggaactgatcgatggggaaaaatcctttatccgctcggtatacggcgtgggctaccgctgggaagccgagccttgccggctgatgaatggggtttagggggaaatcagcgcgtccagtcttcaaccgccaacccgggcaccatggcgaatgcgcgatcgttggtcaccagcgtcgcgccacggctctgcgcgtgagcggcgatcagttgatccatcgcgcccatgattttgccctttctctccatgtttgcccgcatttcaccgtagcagcgggcggcctcgctatcccatgcatagaccgtcaccgcagcaagaaaggcctcgaccatgctttgcaacgccttgttccgccgtttagccacaccgtaacgcagttccgcctccgtgacgctggaaatacatacggcataaggcgggagcttttccatgacgttaagcacctgcggatgctgccgaaacaagtggctgacggtgttggtatcaaacatgtacatcgcctactcttcctctgagaagggatcgcggtcggcaaccccttgctgacgatcttccgcgccaagaaactcttgcggcaccggcgtttgggcgataatgctcagcagcggtgcccagctgtccggctttgccggatatttggataaaatcacgttgccctcccgatcgcgacggatatagacacgatccgtatcaaattcaaattccaccggtaacctcaccgcctgatttctgccgtttttaaacagctttgcgatcctttccatctcgacacctccacagcaggcataggccaaagcatatgcctgtagcgtgtcgatgccaagatgtatcgctcatttttcatccacattgacgaaacggccaaacagtaacgcacaatctcacggggtgacaccctgttcccctcgttatgcggcgcactgcgcaatcacgccttctcccttagcttcccgtgcggcgctgtgcctctcgggcgaaaactccgcgccggcgcaaaaaaactgcgcattttttcaactaagctgctgtgaggtttagccgccgattttcaagcgattggctacacttacatcacgaatcggaacctacaggagaagaaccatggcaatcggtcattacgagctgaaaaaagcaaagaacggacagtaccacttcaacctgaaagccagtaacggcgagatcattctggccagcgagatgtatgccagcaaagcctcggcagagaatggcatcgcctcggtgcagaccaattcaccgcacgaagcgcagtacgaactgaagcacagcgccagcaatcagccctactttgtgctgaaggccaagaaccatcaggtgatcggcgtcagcgaaatgtacagctccgaaagcgcggccaaaaacggtatccagtcggtgataaaaaacggcccgaccaccgatatccgcgatttgagcgcctgatcccccgtttcacccgcgcggtggcggccaccgcgcgttttccgtttgaccgggatcaatctcccttgaataaatccggttaactgctgatttcttgccgcgctgcggctacaatcccccgcttttactgcgccatcaggtggcgtggtgctgacctgaaatcagaccgagacacactatgtttacaccagaacttctctccccggccggcacgctgaaaaatatgcgttacgccttcgcctacggcgccgatgcggtttacgccggccagccgcgctacagcctgcgggtgcgcaacaacgagttcaaccacgagaatctggcgcagggtatcaacgaagcgcatgcgctgggcaaaaagttctacgtggtggtgaacatcgccccgcacaacgccaagttgaaaaccttcctgcgcgatctgaagccggttatcgatatgggcccggatgcgctgatcatgtccgatcccggccttatcatgatggtgcgcgaagccttcccgcagatggacatccacctgtcggtgcaggccaacgccgttaactgggcgacggtgaagttctggaagcaaatgggcctgacccgcgtgatcctgtcgcgtgaactgtcgctggaagagatcgccgagatccgcgccgaagtgccggacatggagctggagatcttcgtccacggcgcgctgtgcatggcctactccggccgctgcctgctgtccggctacatcaacaagcgcgaccccaatcagggcacctgcaccaatgcctgccgctggcagtacaaagcggaggaaggcaaagaggacgacaccggcaatatcgtgcacctgcacgagccgatcccggtgcaaaccgtcgagccgacgctgggcatcggcgcgccgaccgacaaggtgttcatgctgtctgaagcgcaaaagccaggcgaatatatgagcgccttcgaggacgaacacggcacctatatcatgaactccaaggatctgcgcgccatccagcacgtggagcgtctgacgcagctcggcgtgcattcgctgaagatcgaagggcgcaccaagtcgttctactactgcgcccgcaccgctcaggtctatcgccgcgccatcgacgacgcggccgccggcaaaccgttcgatccgaccctgctcaccacgctggaaggcctggcgcaccgcggctataccgaaggcttcctgcgccgccacgtgcacgaagcgcagcagaattacgactacggctcctcgctctccgagcgccagcagttcgtcggcgaattcaccggcgtgcgccgtgatggctgggcggaagtcgacgtgaagaataagttcgcgctcggcgacagcgtcgaaatgatgacgccgggcggcaacgtggtgttcaccctcgagagcatgcaaaataagaaaggcgaatcgattgaggtggcgccgggcaacggccatatcgtttatttgccgatcccgcaggatatcgatctcaattatgcgttgctgatccgcaatttggcggaagaaaatagcgccggggcataaaaatgaatcgccgtcattcggcggcgatttttagcaaatattagaattggatcacatcaatgcgcgcgcagcttggttactatcacgctgcttaaaacgaacaacgaaaatatttgcatagcaatactaggaaccacctccttagccggcccaatctcccttgggctggctttttctttatgggtgcgcctatttttttccaccatgcctatttccataacttattcccgttatccgttttaataataataatcacgccgcttcgatatataaataacgctacagcgattaatcctcgcttctttaacacttcgcttatttctgcgtaaaattcagataaattcgccttgcttcatattcactgagcgtcggcaaataaccggaattagctgaatattctgatggcctggtggcggcagctggtttatcttgaggcattcttggttttccgccggaggatatcggcaatgcctcaacactcacatgcgtccgccctgcttatcatcaacggcaaaggcgccggtaacgaagagctgcgtcaggcggtcaaccggctgcgcaaagaacagataacgctgcacgtgcgcgtcacctgggagcacggcgatgccgcgcgctatgtcgcggaagccgcgcagctcggcgtcggcaccgtcgtcgccggcggcggtgacggcaccatcaacgaagtggccgccgcgctggtgcagctgccggcgcacaaccggccggcgctgggcatcctgccgctcggcaccgccaacgacttcgccatggcgtgcaatatccctccgtcccccgaactggcgctgcagctggcgatcaagggccgttcagtgccgatcgatctggcgaaggtcaacggcgagcgctatttcatcaacatggccaccggcggcttcggcacccgcatcaccaccgaaacgccggagaagctgaaagcggcgctgggcggcgtgtcctactttgtgcacggcctgctgcgcatggatacgctgcaggccgaccgctgtgaaatccgcgggccggactttcgctgggccggcgaggcgctggtgatcggcatcggcaacggcaaacaggccggcggcggccaggaactgtgccccagcgcgctgatcaacgacggcctgctgcagctgcgcctgctgatcgccgatgaactgctgccggcgctggtcgccgccctgttcaacgacgaagagagcaacagcatcctcagcgcggcgctgccgtggctcgagatcgacgcgccgcatgagatgactttcaacctcgacggcgaaccgctcaaaggccgccatttccgcatcgaagtgttgccgcaggccatcgaatgccgcctgccgcctaactgcgccctgctgggctgaccttgtcgggcgcagccactgcgccccgcttcttcccctctgttcacccgcttccgcgcacgatcaaatgtgatcctctccggcaaattcattaattcatacttgtatggtagttagttcatggcgtattttcgcgctatctctccgcagctacaggatgtgaaggttatgaaaatcgtcaacgccgaggtgttcgtcacctgcccggggcgcaactttgtcacgctgaaaatcaccaccgatgacggcatcatcggcctcggtgacgccacgctgaacgggcgcgaattgccggtggcctcttacctgaaagatcacctctgcccgcagttgatcggccgcgacgcgcagcggatcgaggacctctggcaattcttctacaaaggcgcttactggcggcgcggcccggtgaccatgtccgccatttccgccgtcgacatggcgctgtgggacatcaaggccaaggccgccaacatgccgctgtatcagctgttgggcggtgcctcgcgctcgggagtgatggtgtattgccataccaccggccactcgatcgatgaggtgctcgacgactacgccaaacataaagagcaaggcttcaaggcgatccgcgttcaatgcggcgtgccgggcatgaaaaccacctacggcatggccaagggcaaaggccaggcctatgagccggccaccaagggcgactggccggaagagcagctgtggtcgacggaaaaatacctcgacttcacccccaaattgttcgacgcggtgcgcaacaagttcggcttcaacgaacacctgctgcacgacatgcaccaccgcctgacgccaattgaagcggcgcgcttcggtaaaagcgccgaaccgtatcgcctgttctggatggaagatccgacgccggcggaaaatcaggcctgtttccgcctgatccgccagcataccgtcacgccgatcgctgtcggcgaggtgttcaacagcatctgggactgcaaacagctgatcgaagaacagctgatcgactacatccgcaccaccctgacgcacgcgggcggcattaccggcatgcggcgcatcgccgacttcgcctcgctgtatcaggtgcgcaccggttcacacggcccttccgatctgtcgccgatctgcatggcggcggcgctgcacttcgatctgtgggtgccgaacttcggcgtgcaggaatacatgggctattccgagcaaatgctcgaggtgttcccgcacagctggacgttcgacgacggctatatgcatccgggcgacaagccgggcatcggcatcgagttcgatgagaagctggcggcccgttacccctatgaaccggcctacctgccggtcgcgcgtctggaggatggcaccttatggaactggtaaacaccatgcgcagcgtcgtgatcgaacagcccgggcgcctggcgctacagacccgcgcactgccgcagccgacggccggcgaggtgcgggtcaaggtgaaattcgccggcatctgcggctccgacgtccatatctatcacggccataacccgttcgcccgctatccgcgtgtgatcggccacgagttcttcggcctgatcgatgcgctgggcgaaggcgtcgatccggcgcgcctcggcgaacgcgtctcagtagacccggtggtgagctgcggccactgctatccctgttcggtcggccgccccaacgtctgcacctcgctgcaggtgatcggcgtgcaccgcgacggcggcttcagcgactatgcctgcgtgccggcgcgcaacgcctatccggttccgccggccatcagcgatcgccacgccgcgatgatcgaacccttcagcatcgccgccaacattaccgcccatctgcaaccgcgccccgacgatatcgcgctaatctacggcgccgggccgatggggctcacggtgatccagacgctgaaaggggtgtacggcgtcaggcaggtgtgggtcgtcgatcgcatcgccgagcggctggagatggcgcgcgccaacggcgccgaccaaacattcaacaacgccgaggccgcattgccgcaggcgctgcagcagcgcggcgttcaaccgacgctgatcgtcgatgccgcctgccaccccgccattttaccggaggcgatcgcgctggcttcgccggcggcacgcatcggcatcatgggcttttccggcgacgcctgcaccctgacccagcagagcatcaccagcaaggagctgtcgatcttctcctcgcgcctgaacagcgcgcgctttccgcaggtgatcgcctggatggcggacggcaagctagacccgcagcggctgctcactcactgcgtgcccgccgacgacgtcgaacgggcgatgcagatgttcgagcgggatcagcgcacctgctgcaaggtgctgctgcagtttgagtaacgccaaggcggcatcggggcatgggcggcgcccgccgcccatgcaaacaatgaagcatcacgattaaaacgacacccagtggagcgctttatgtttaaaaacctgcgttggaccatcgtgttcctgctgttcatggtctacatgatcaactacctcgaccgcgtggcgctgtcgatcaccgtgccgatgatcgaacaggatctgatgctgaacgccgaacagttcggtctgatcttcggcagcttcttcttcggctacgccattttcaacttcgtcggcgggctggcggtcgaccgcttcggcccgacgctggtgctgggcgtggcggtcggcctgtggtccatcttctgcggcatgacggcgatcgccaccggtttttactcaatgctgatcctgcgcgtcctgttcggcatggccgaagggccgatctgcgcctcggccaacaagatgatcaacggctggttcccgaagaaacaggcggcgaccgccgtgggcctgctcagcgccggttcgccgttgggcggcgcggtggccgggccgatcgtcggctatctggcgctggcgttcggctggcggccggcgtttatgattatctgcgccatcggcatcgtctggatgctggtgtggttcttcgtggtggcggataacccggcgaaaagccaacgcgtcagcaacgaagaacgggcgctgatcgcacggttgaaacaggaaaatctcggcgaggaaagcgccttgagcgacgccccgcacgggctgggctactacctgaagcagccgatcattctggtcaccgccttcgccttcttctgctacaactacatcctgttcttcttcctgagctggttcccctcgtatctggtgcaggcacacaacctgaacatcaaagagatgagcctgaccacgatgatcccgtggatcgtcggcttcgtcgggctggcgctcggcggctatatttccgacaagatcttcaacatcaccggcaaattgctgctgtcgcgcaagatcgtgctggtcaccagcctgctggcggcggcggtgtgcgtggcgttggcgggcaccgtcagcagcgtggtgccggcggtgatgctgatgtcggtgtcgatcttcttcctctacattaccggcgctctctactgggcgatcatccaggacgtggtgcataaatcccgggtcggcggcgccagcgggttcattcatttgatcggcagcgtctccggcatcatcgggccgatcgccaccggctacatcgtgcagaacaccggcaagttcgacagcgcctttatgctggcgggcggcgtcgccgcgctgggcgcgctgctggtgctgctggtgatcaaggcgccgcgcgcaacggcgggcgtgcaaatcttaaaaccctaacgccagacggggcggcttcgcccctttgcttacctctccagggacattgaacatgagactttccgaccacagcgcgctgccggccgccgttatccggcccggctacgcacgtgagcgcgtgaaaccgcgcatggcgcatatcggcttcggcgcgtttcaccgcgcgcaccaggcgatgtacgccgacaggctggccagcgagcacggcagtgactggggctactgcgaaatcagcatgcagcacggccggcaaaagatcgccgatctacggcaacaggacctgctgttctcggtggcggagatggacgacgacggttggcggggccgggtcatcggcgtggtgcgccaggcgctgcacctgcaaaccgacgggttggcggcggtgctggcggccctgacgcagcccgagatcgccatcgtctcgctgagcatcagcgaaaagggctattgccaccaccccgccagcggccgactgatggcggaacacccggcgatcacgcatgatatcgcccacccggcacagccgcagtcggcgccggggctgctgctggcggcgctgcgcctgcgccgtgaacgcgggctgccgccgttcgccgtgatgtcctgcgataacatgccggccaacggccgggtcacgcgccaggtgctggtcgaactggcgcagcggcaggatccggcgctggccgactgggtgcgtcaagaggtcgccttcccttccaccatggtggatcgcatcgtgccggcggtaacgccggaggcccgccggcagttgcgcacctggctgggcggcgtcgaagatgaggtcggcgtagcctgcgagccgttcagccagtgggtcattgaagatcgatttccccaagggcgcccggcctgggacaaggtcggcgccgaactggtgagcgacgtgctgccgtacgaggagatgaagctgcgcatgctgaacggcagccattcgtttctcgcctacctcggctacctagccggttatcagcacatcggcgactgcatgcaggatgcggattttgtccgcgccgcccgtcacctgatgctggcggaacaggcgccgaccctgcaggtgccgaacgtcgatttggcgcagtatgccgactcgctgctgcaacgttaccgcaatcgcgcgttgaaacaccgcaccgcgcagatcgccatggacggcacgcagaagctgccgcaacggctgctggacgcgatccgctggcatctggcgcgcggcagccgcttcgactgcctggcgctgggcgtcgccggctggatgcgctacgtcggcggccgcgatgaacaaggcgagccgatcgccatcagcgatccgctgcgcgagcgcctcgccgcgttggtcgccggcagcgaggaaggccggccccgcgtcctggcgctgctgcaactcgacagcgtcttcggccgcgatctgcccgattcgcctgacttcgtccacgccgtcagccacgcttatcaccaactgctgagcctgggggccaaagccgccgtcgccgctctgccgcttaccgaccgggaggtttccgatgaccgtcaccacgcataacgccgtcaataccggcaatcaaccgctgctgcggcgcgtcgccagcgcgtcggccatcggcaccgccgccgaatactatgatttcttcgcctacggcaccgccgcggtgctgttcttcgaccagctgtttttccccagcgccgatccgctgatcagcacgctggcggccttcgccacctacgcggtcggtttcctggcgcgcccgctgggcggcatcgtgttcggccatatcggcgacaaagtcggccgcaagaaagcgctggtgatcaccatcctgatcgtcggcctcggcaccttttgcatcggcctgctgcctacctatgagcagatcggcatctgggcgccgatcgcgctgatctttatccgcgtgctgcagggcttcggcgtcggcggcgaacaggccggcgcggtgctgatgaccgccgaatacgcgccgccgccgcggcgcggtttctacgccagctgggtgcagatcggcgcgccggccggtttcctgctgccgtccgggctgttcgcgctgctgaccgccgtgctgtcgccggcgcagatgctggactggggctggcgcattccgttcctgctcagcctgctgctggtgctggtcgggctgtttattcgcctgaagatcgacgagtcgccggtgtttacccaaatccgcgccaccaaagcggtggagagccggccggtggtggaagtggcccgccgctatcccggccttatcgccaaaggggtgtgcgccaagctgatcgaagcctgcgccttcgccatgttcaccgtgatcgtgctggcctacggcaaggccaaccacctcaacgaaagcattttgctggaggcgatgatcgtggcggtgctgctggagattttcgccattccgctgatgggccgcctctccgatcggctggggcgcaaaccggtttacatcgccggcgcgctgctgcaggtggtgtgcatcgtgccgttctttatggcgatcaacctcgataatttctgggtgacgcagatcgccatgatcgtggtgctgaccttcggccacagcatgtgctacgcgccgcaggcctcctacttcccggagctgttccccacccgcgtgcgctgcagcggcatcgcgctgatctggcagatcggctcgctgatcggcagcggcattctcgggctgctggcggtgaagatcctgcaggtgaccggcggccattactacgggctggccggttacatgatggtgctgggcgtggtgtcggccctcggcctgagcctgatgccggaaaccgcgccagagcggcgcaagcaggaatatcaggattggcatcactgagttcccctgcctggcgggtggatttatccccccgccctcaaccaataatctgctagtatggtggcattcgaactccagccagatgcctgattgtcgccatgtctgaaacgtacagtctcaccaacaacgtcccggtcaaccagcagatctatcgctttctgcgcaaagatatcgtcgattgcaccatcccccccggcaccctgctgtccgagaaagagatctccacccgcttcaacgtttcgcgccagccggtgcgcgaagccttcatcaagctggcggaggccggcctggtgcagatcctgccgcagcgcggcaccttcgtgatgaagatttccgccaaacgcgtggccgacgggcgctttatccgtcaggcggtggaatgcgccatcgtgcgccgcgcggccgagcgcgccactccggcgcagctgatgacgctggagcataacctgcaccgtcaagagctggcggcgcagaacgggcaaacgcgcgaatttttggcgctggacgacgagttccaccagctgctgaccctgtttgccgactgcccgctggcgtgggagaccatcgaaaccatcaaggccaccatggatcgggtgcgtttcctcagcctgagcgaagtctcgccgccggagagcctgatcaagcagcactaccgcatctacgaagcgctgaaagcgcgcgatgccgaggcggcggagcgcgccatccacgatcatctgcaggagatgatctactccatcaccccgatcgcccaacagaataccgcgtggttcgagatcgaataatcaatcgcttagcgcgccgggggcgatcgcccccgcgtatttggccacgcaaatggcatttcctctcaatcgcatctattgtttgtccttgccggagcaagttcggtagcatcgctttacagcttcaatcaccgctttttactgcgccggtggtcaaaaacccttgcattgccggtgtatgaagaagcttaatcgggagtgaatcatgactgatattgtgcagttgctaggaaaggaagcggaagatctgctgcaacaccgctgtaccactatccccgccgagaatctctacctgccgggcgccgacttcgtcgaccgtgtaatgatcgataacaaccgccccaacagcgtgctgcgttcgatgcaaaccctgttcaaccacggccgcctgggcggcaccggttatctgtctatcctgccggtcgaccagggcatcgagcactccgccgccgcctcgttcgccgccaacccgctgtatttcgatccgaagaacatcgtcgagctggcgattgaagccggctgtaactgcgtcgcctccacctacggcgtgctggcgtcggtatcgcgccgctatgcgcataaaattccgttcctggtcaaactcaaccacaacgaaacgctgagctatccgacccagtacgaccagaccctgtacgccagcgtcgagcaggcgttcaacatgggggcagtggcggtcggcgccaccatttactttggttcagagcagtcgcgccgccagatcgaagagatctctatcgcctttgagcgcgcgcatgaactgggcatggtcaccgtgctgtgggcctatctgcgcaacccggcgttcaacaaagacggcgtggactaccactccagcgccgatctgaccggccaggccaaccacatcgccgccaccatcggcgccgacatcgtcaaacagaaaatggcggaaaacaacggcggctaccgcgcggtgaaattcggctataccgacgaccgcgtctacaccaagctgaccaccgatcacccgatcgatctggtgcgctaccagctggccaactgctacatgggccgcgccgggctgatcaactccggcggcgccgccggtgagaacgatctgcaggaatcggtgcgcaccgcggtgatcaacaaacgcgccggcggcatgggcctgatcctggggcgtaaagccttcaagaaatcgatgaaagacggcgtggcgctgatcaacgccgtgcaagatgcctatctggacaagaaggtcaccatcgcctgatgtgacggaccgcctgtcccaaagcccggttcgccgggcttttttgtgcccgttcccctaaacccgacaccgctaatcttctctttctttcactttaaactttcaaaataaaatatttatctttcaaattgtgatctatttaaaacaaatagcccaacaaagtgactactgtaaggcccatggcgatagagccgccgttcgctccaggccataacagtccattacaggagaacataatgattgagctaatcacccacggcgccgagtggtttatcggcctgtttcagaaaggcggtgaagtgtttgtcggcatggtgaccggcattttgcctttgttgatcagcctgttggttatcatgaacgcgctgatcaaatttgttggccaggaacgtatcgaacgattggcgcagcgctgcgcgggcaaccccgtttcgcgttatctgctgctgccgctgatcggcacctttgtcttctgcaacccgatgaccctcagcctggggcgcttcatgccggagaaatacaagccgagctactacgcggcggcctcctacagctgccactcgatgaacggcctgtttccacatatcaaccccggcgagctgttcgtttacctcggcatcgccagcggcctgaccaccctcggcctgccgctcggcccgctggcagtgagctatttcctggtggggctgttcaccaacttcttccgcggctgggtcaccgatctgactaccagcctgttcgaacgcaagatgggcatccgtctggatcgccaggtgcaactttaattcgtggagtgcagcatgagtgcttatatccgtattgaaaaaggcgccagcggctggggcggccctttggaactgccgatcgaacccggcaaaaaagtggtgtacatcaccgccggcacccggccttccatcgtcgatcgcctcagcgaattgaccggctggccggccgtcgacggtttcaaagagggcgagccgccggcggaagagatcggcgtggcggtgatcgactgcggcggcaccctgcgctgcggcctgtacccgaaacgccgcattccgacggtcaatatccatgccaccggtcagtccggcccgctggcgcagtttatcctcgaagacatctatgtctccggcgtgcgcgaccacaacatcaaccgaatcgaagcggcagatagccaacccgccgccgccgttgccgcgccgcccaaggcgcgcgactacgacaccagcaagaagatcaccgagcaaagcgacgggctgctggcgaaggtcggcatgggcatgggatcggtggtggcggtgttcttccaggccgggcgcgacactatcgacaccgtgctgaagaccattctgccgtttatggcattcgtctcggccttgatcggcatcatcatggcctccggcctcggggactttatcgctcacggcctgacgccgctggccaacagcccgatcggcctggtgacgctggcgctgatctgttcattcccgctgctgtcgccgttcctcggccccggcgcggtcatcgcccaggtgatcggcgtgctggtcggggtgcagatcggccttggccatattccgccgcagctggcgctgcccgcgctgttcgccatcaacgcgcaggccgcctgcgactttattccggtcggcctgtcgctggcggaagccaaacaggacaccgtgcgggtcggcgtgccttcagtgctggtcggccgcttcctgaccggcgcgccgacggtcctgatcgcctgggccgcctcggccttcatttatcaataatgtgatccccagggagacgtttatgcacaccatttttcacaccaccatcacgcagatcggcggctgcgcccgcgacgcgttgctggacaacatgctgatcaccttccgtgaaggcgccccggcggatatcgaagagttctgctttatccaccgccacggcgcaaccgccggcgagctgcaggtgggcggcgtgatggaactggcgcagcagcgctacgccatcaccgccgtcggcagcgtcgccacgcagaatctgcgcgagctgggccatatcaccgtgcgcttcgacggcgaagccgaagccgaatttcccggctcgatccacgtatccggcccgacgccgaccgatatcccgttgggcagcacgctgtcatttatcgcataaggagtagaccatgtctgaagtagctgtagtgattggcggcggccaaacgttaggcgcctttttgagccacgggctggcgcaggccggttatcgggtggcggtggccgatctgaacgccgacaacgccagtctggtggcacagcagatcaacgaagaatacggcacaggcagcgcctgcggttttcaggccgacgccaccgacgagcagagcgtgatcgcgctggcggcggcggttgaccgggcgtttggccaggctaatttgctggtgtacagtgccggcatcgccaaggcggcgccgatcaccgatttcccgctgggcgacttcgaccgctcgctgcaggtgaacctggtgggctatttcctctgcgcccgcgagttctcgcgcctgatgatccgcgacggcatcgccgggcgcatcatccagatcaactccaagtccggcaaggtcggcagcaagcacaactccggctacagcgccgccaagttcggcggcgtggggctgacgcagtcgctggcgctcgatctggcggagtacggcatcaccgtgcattcgctgatgctcggcaacctgctgaagtcgccgatgttccagtcgctgctgccgcagtacgcgcaaaaactgggcatcgcgccggatcaggtggagcagtactacatcgacaaggtgccgctgaagcgcggctgcgactaccaggatgtgctgaacaccctgctgttctacgccagcgacaaggcctcttactgcaccggccaatcgatcaacatcaccggcggccaggtgatgttctgacgccaatcgatgcccccttcagcagagggggctaaggagaacgccatgacacaagctttgatcgccttcgcgctgctggcctggctgctgcaaatcgccttcggctggtggcaactgcaacgtttcaaccgcgccttcgatggtttatgccggctgggcgccgtgggcgtcggccgttccggcggccgttttcgcccgcgagtggtgctggcgctggccttcgacgccgaccggcgggtgtgcggcagcctgttgctgcgcggcctgaccgttttcgcccggccacgcccgctgcctcatttacacgggttgcatcagcgggatttgcgcccggatgtgatcttccccgaggatcgcgcatgccagtctgcactatcgttagcgattgaacccaaatcgtgatattttcacattaaaagacattacctttcatagtgaattattcagcgaggggaaatgcccaactcttgtgaacgggaatcgcgatgaaaccaaagcagcggcaggccgctatccttgaatatctgcagcgacatggcaaaacggcagtggacgccctggccgagcatttctccactaccggcaccaccatccgcaaggatctcaccctgctggaagaagaaggcgaggtgatccgcacctacggcggcgtggtgctcagccgcgacgacggcgatcagccgatcgaccgcaaaacccatatcaacaccgagaaaaaacgccagatcgccagcgccgccgtggcgctgatcgccgacggcgactcactgatcttcgacgccggcagcacggtgctgcagatggtgccgcacctggcacagttcaacaacatcacggtgatgaccaacagcctgaccatcgtcaacgcgctggtggagctggacaacgatcagaccatcctgatgcccggcggcacctaccgcaagaagtcggcctcgttccacggcagcctggcggaatcggcgtttcagcaattcagcttcgacaagctgtttatcggcgcggacggcgtcgatctcaacgccggcgtcaccaccttcaatgaagtgcacaacgtcagcaaggcgatgtgcgaagccgccggccgcattattctgttggtagactcctcgaaattcggccgcaagagcccgaacgtggtgtgcgagctcagcgccgtcgacacgctgatcaccgaccgagacatcaaccccgattatctcgccgccctgcaggcgaaaggcatcaatatccttctggtaggagaccccgatgagtaacgccaacgccctgctcgcctttgcccgcgaaacgctggagatcgagctgaccgaagcgcagcgcctgctggcacgcctagatgacaacttcgtctgcgcctgcgagctgctgctgaactgccgcggcaaagcggtgatttccggcatcggcaagtccggccatatcggcaagaagatcgccgcgtcgctggccagcaccggcacgccgtcgttcttcgtgcatccggcggaggcgctgcacggcgatctcggcatgatcggcgccgacgacgtggtggtgttcatctcctattccggccgcgccaaagagctggatctgatcctgccgctgctggcggagaacggcattccggtgatcgccatcaccggcggcaaagagtcgccgctggcgctggccgccgcctgcgtgctggatatcggcgttgagcgcgaagcctgcccgatggggctggcgccgacctccagcgcggtcaacaccctgatgatgggcgacgccctggcgatggcgctgatgcgccagcgcggtttcaacgcggaagacttcgcccgctcgcacccgggcggcagcctgggggcgcgcctgctgaaccgcgtgcatcacctgatgcgcaccggcgatcgcctgccgcgcgtgagcgaaagcgccaacgtgatggaagcgatgctggaactgagccgcaccgggctggggttggtggcggtctgcgacgcgcagcagcgtgtggtgggcgtatttaccgacggcgacctgcgccgctggctggtgaagggaaatagcctgcaggatccgctcagcccggcgatcacccgccccggctatcggctgccggagcagtggcgcgccggagaggcactggaagcgctgcacgaacagcacatcagcgcggccccggtggtcaacatggacggcgtgctggtgggggcgctcaacctgcacgatctgcatcaggccggcatcggctgatcggtgctgggggcgccggcagcggcgcccccggtcagatcatttccagtcgggattgttctcgaactgctgcttcagcagcgccttcatgtcttcatccggcttgccgagccactggtacttagcatatttcttcggatgatcgacggcttccggccgatcttccacctcgacccgcacgccccaggcctgggatttgtccgcgctgaacgccacgatcaaaaagttgttgccgcagtcgtgcggcttgcacaggttgccgaccagatactctttgcccttccagctcaagttttgcgccggcgtagaggtgccgacgcccttgcgcgcccagcccggcatccgcgcctggcctttaaccatgttttgccagctggcctgataccccggctgctgaatcaaatccgatgtggtgacgatctgctgggcaaagctgcccgcgctgaagctgagcagtgcgccgaagagggcgcaacgcagcgcctggtgtcccgtcatagtccttctccctaggttaaatcaggtttcgcccataaaaccgggcctgaactagtcagaccacggttgcggcaaaaagttgactcaccaccaggcgtgaaaatgatgcaccggcccgatgccgtgccccacttccagcgtatccgcctgttgcagcgcttgttgcaggtagtccttggcggcggccaccgtggccgcccagtcggcatggcgcgggcgcagcgccgccagcgcggccgagagcgtgcagccggtgccgtgggtgtggcgggtggcgacgcgcggcgcggtaaaacgctgctcgccttcgacggtgaacagccagtccgggctctcgctttcgctcaggtggccgcccttcatcagcaccgcccggcagcccatcgccagcagcgcccgcccctgctcgcgcatctgcgcttcatcttccgccggcgggcacgccagcagcgccgccgcttccggcaggttcggcgtaatgatcgacaccagcggcaacagctcgcgccggatagactctaccgcctccggcgccaacagcggatcgccgcttttcgccagcatcacggtgtccagcaccacgaattccggccggtaatggcgcagccgttcggccaccgcctgcacgatgtcggcgttggccagcatgccgatcttgacgctgtcgatgcgcacgtcgctgaacaccgagtccagctgcgcggcgacgaacgccggatcgatgtaatacaccgactgcacgccgcgggtattctgcgccaccagcgcggtgatcaccgaagtgccgtaggcgccaagcgccgagaaggccttcaaatcggcctgaatgccggcgccgccgctgggatcggtgccggcgatggtcagcgcgttaatacgtttcatcacagatcctccccgcgcagttgatacagggcgtcgaggaacgccggcgtaaagctgcccggcccggcggcctgcctggccgcgaggccgccgcagtgtgacatcacccgacaggcggtcgccacgttgtccaggcgatcgcccggcagggcgcaaaacgccgccgccaccgccgacagcgcgcagccggtgcccaccacccgcgtcatcagcggggagccgccttcgatcgcccagtcgcgttggccgtcggtgacgtaatccaccgcgccggtgaccgccaccaccgcgccgctgcgccgcgccagctcacgcgcggcgggcaatgccgccaaggaatcgtcgccgctgtccacgccgcggccgctggccagcaacccgttgagcgccatgatttccgaggcgttgccgcgtatcgccgccggttgctcgtccagcagctgtttagcgaaggcggtgcggtaggagagcgcgccgaccgccaccggatccagcgtccagggcttgccggcctgattggcggcggccaccgccgcccgcatcgattcggcgcgcagtgcattgagggtgccgacgttgatcagcaggccgtcggccagcgcgctgaactgcgccgcctcttgcggctccaccaccatcgccggggaggcgccgagcgccagcagcacgttggcagtcagcgattgcaccacttcgttggtcaggcagtggatcagcggaggccgctgttggaattgggtcaggcaggccgcggcgcgggcgccgggtagtgcatcaggtcgagcgatcatattcctcccaaccggcgttcaagaaggcggcgccggttgagcggccgtgacttccctacgctggcattatccagatcaggtaatacgggtatttctcagccttcacgcagaagggcaccccgagtcatgaaaatcaataggttgtgatcaacgttgcgttaatccctgcaggggatcatgccagcggcggcgcggacaaacaagcgattaaattggctcgcgcctaagcgatgcttccctcttttcccgccagatacaggctcagcacgccgggcagctccgccagggtaaacgccacgttctgcggcgccgttttgaagatgtggtgcaaggtgccggccaccaggctttgcaacagccgggtttgctgcaggatctccgcttcggcggtctcggggcggcgcagctgcagcactcgggcgatcagcgccaggaagctggacttttcatccggcaggttcatttcccgcatcaccggcaggtagtcggcgtgctcgcgcaggtactgcgcatagggagaaaacagtcgctggatcacctcttcagcggagaggcgcctccactcgtcgtcgctggccaacgccatgtcgcgcaccagcgcctcgatcgattcggtgtgccgatccgccagcgccttgatcaccgcgtggcgatcgggaaaaaagtgatacatcgagccgatggaggttttggcgtgcttggcgagccgctgcatgctgagcgccgccagcccgtcctgcgccacgatcgccgccgccgaatccagaatggtttgtacgcgttgccgccctctttcctgctgcggctcccgcccggtgatgtgttcgtcgatttgcatattcgtttctgcccgctgtcatcaacgcattatacccatttgccgccgcgaaggcagggtgacacaaaaaactagattaactcctctagtttagagtagagtatttattctagtttctccttgcgcaagcgtgaggaagacaaacagtgacctcactcactgaaaaagagtcattccattcggcccgtcgaccaagccaatcgccagagaaagccctatgcccgacaaaaaactgcttatcacctgcctgaccgcgctgctgctcaccgggtgctcaccggcaccgtccatggtggtgttcggcgcttcattccccgactggctgttttgcctgtgcggcggcgtggcgggcatggtggcgatccacctgctgctgcgcgccccggaaaaacgcgcctggctggcgccgcagctgctgacgtatccggcgctgaccgcgctgatcgccatgctgacctggttactggttttcccccactgagactgacgccatgacccaaccacaaacctctaacaagcgcagactgctggtgcttaccatcctggcgttgacgctcatcgtggccgccgtcgtcgtctggcgggtggaaaacgcccccactaccgacgatgcctacgcctatgccgacaccatcgacgtagtgccggaggtgaacggccgcatcgtcgagatgccgatccgcgacaaccaggaagtgcggcaaggcgatctgctgttccgcatcgatccgcgcccttaccaggacgcgctggcggccagcgaagcgcgcctgatcacactgaatgaacagatcaaactgacgcagcgttcggtcaacgcgcagcagtacaacgccgaatcgatgaacgccatcgtcaaacgctcgcaggcgctggtggcgcaggcgaccgacaccctcaaccgccggcagaagctgctcggcaagaactacgtttcggcggaagaagtggaaaccgcccgcacctcccagcgctcggcgcaggcggaactgcaggccgcattgctgcaggcgaaacaggcggaagccgccgtcagcggcgtcgaagccctggtcgcgcagcgcgccgaagtgcaggccgacatcgccatcgccaagctgaatctggaatttaccgaggtgcgagcgccgttcgacggccgcatcgcctccctgaaaaccaccgtcggccaatatgcctccagcgccaaaccggtgttcacgctgatcgacacccgccactggtacgtggtcgccaacttccgcgaaaccgacctgaaaggcgtgcatcccggcgtgccggccacgctgtatttaatgagcgacgccggccagaccttcagcggcaaggtagagtcggtcagctacggcgtgcagcccgacgacggcggcagcgtgctgggcgggctgcccaacgtgtcgcgcaacatcaactgggtgcacgtttctcagcgcttcccggtcaagatcgcggtagaggctcccaacccggcgctgttccgcgtgggcgcttcggcggtggccaagctgaacctgcgccatgaagaataaaacgatgtatcgcggctggctgtcccagttgatcgacgagctgcgcccttcggacagccgcataaacctggtgatccgcgccctgctctccagcgcgatcgccatcgtgatctcgcagacgctgcaggtaccgtggctggcgctgtcgctgatcgcggtcttctttatcacgcagtccaatatcgtgatcacccgcgcgatcggtatcctgtttttcgtcagctccacgctggcgatcggcgccgctatcctggtgctgaagttcacctacgactacccgatgctgcgcatcttgctctccagcgcgctgtttttcctcagcgtgttcctgatgcgggtgaccaaggttggggtgctgttcttcctgatggcgctggtggtgatctacacgcaaagctttgtcgatctcactccgcaggcggaagtggtgatacgactggtgctgtgggtatgggtggcgatcaactacgccatcctgctcaccctgatcgttaataccctgctgctgccggccgaaccgctgaaacagctaaagggtcggatgaacgcggtgttggacgaaacccgcgctatgttgaccaacggcggcgagacgcgcgatctgagcgccatctcccagcacgccaccgagctgcataagctgctgcgcttttcggtgatgcgcagcgatcgctgccgcgccaacgagcccggttatctggcgctgatcaccctggtgttgcagctcaatatcctggcctaccagctgccgccggctttcggcgcggccgcgcgtcaattggcgcaagagatagatgccgcctgccgcgcactgcaaaccgcgataagccacgaaagcgcactgcgattttccgtcgcgatcgccggcagcgacgatccgcaggtgccggcgccgctcaatgaaatggccagcctcctgcaggtctacgccaaccgcagcgactacgccgacgccctgcaggccgcaccgccgccgaaagtgcccttctttacccccgacgccctgaccaacccggtttacatccagttttcgttgaaaacgctgctgaccgtactggtcgcctacgtgttttataccgccgtcgattggtccggcattcataccatcatgctgagctgcctgatcgtggcgcagcccagcctcggcgccacacagcggcgggcgcggctgcgtctcggcggcgcggcgatcggcagcctgctggcgctgatctcggtggtgtggatcatgcctcacctcgacagcctcgtcggcttgctgctgctgacgctgccggtgatcgccctctccgcctggatcgccgccggctccgagaaaataagctatgccggggtacagatcctgttcaccttttccctggcgctgctggaaagcttcggcccggtcaccgggctgaccgagatccgcgatcgcctgatcggcatcgtgctgggggtagggttcgccaccttcattcacgccacgctgtggccggaatacgaaggggagtcactgcggcagcaggttgccaacgtgctgcgggaactgtcgcgcttcctcggcggcgagaacacaaacgccatcggcatctggcaaaagatcgagggctgcgaagcggtagtggcccgggtgacgctggagccaacctggcagctggcggacgataaccatgaaagcttcacccggcatatccaactgatctttaaccagacgcgcagcctgttgctgaccagcgaaaagctcaacacctatctggcaggcagtggcgcggcgctgtccgcgcaggaacgccaggcgctgttcgaggtgcaacgtcagggcgggcgcgttctcgccgagtatgcggcgcagctttcccgtgcgccgcaagcgttgcgggcgcccgactttcatccaccgttggccgccctgcacgccgacaccgtgcgccacctggctcaggagctgagcgacggggtcaatcgcctgcccgcctggggcgacgcctagcattttccgtttgcggccatgcacgcccggcgccatgcgctatagtgagcaaaaaccaccgggagatgccatgcaaataagaccttaccaagaggccgatcgccccttcctgcgcacgctgtacctggcgtcgcgcaaggcggcgttcggttggcgcgatacctcgaactatcagttggaagatttcgaccgcgcgacgctgggcgaagcgatttgggtggcggaagacggcggcgtgctgctgggattcgtctccgtctaccgcgaagacaacttcattcataacctgtatgtcgatccccatcagccgccgcgcggcgtcggcagtgcgctgctgcaagcggcgcaagccaccttcaccgccaccggctcgctgaaatgcctggtgaaaaatgaaaaagcgctggcgttctaccgcaaacacggctggcgcatcatctccaccggcaacgacggcgaagaagattattacctgatgcattcgccggcccgctagttcttacccgccgcatccggcatcccgcgcagcgtcagccgccaaaacagcaacgcgctcaggctgacgccggcccccagcccgcagacgccgctccaacccgcccaggcgtacatatgggtgccggcaaaggcgcccagcccgctgccgacggcgtaaaacagcatgtagcagcccaccagccggctatgcgactgcgggtgggcgctgaagatcatgctctgattcagcacgtggatcgcctggcccgccagatccagcagcacaatgcccgccaccagccaaaccaggccgctgccgagcaaaccgagcggcagccaggccagcgtcaacagcagcagacacgcgccgctggccgcctgccccagcccgcgatccgccagatgcccggcgcgcaccgccgccagcgcgcccaccgcgccgaccaggccgaacgctcccaccgcggcatgggtgaagttgaacggcggccggctcagcggcaacaccagcgaactccaaaagaggctgaaagcgccgaacatcagcagcgccagcatgccgcgaatttgcagcgtgcggtcatgccgcaacaggctcaacattgaacgcagcaacgcgggataactcagcgtgctgggcgcggtgcgcggcgcaggcagcaggcgcgacaggatcggcagcagcaccagcgtcactccggctgagaagaagtacaccatgcgccagccgccgacgtccgccagcgcgccggagagagtgcgcgccaacaacagccccagcaccaccccgccctgcgccgcgccgaccacccgcccgcgctcctgcggcgccgccagggccgcggcgaatgcgatcagcccctgcgtcatggcggtgcccagtagccccaccagcaacatccccgccagcagccagggcgcgctgtgcgcccagcccaccaatagcagcgcgccgatcagccccagctgttgccccgccagcaatcgatgccggttcaaccgatcccccagtggcaccaccaacagcaacgccagcgcgcagcccaactgagtcacggtgatcaccatgccgaccgccgccaggctgatggaaaaatcgcgggcgatggcgtccagcagcggctgcgcatagtaaacgttagccacgctaaaggcgctggcaccggccaacagcagcaccagggcggccggcagacgccccagcgccgcacagggaggatccagcagtttgtcgctcatcgcacacctcaatctggtttcataattaaacccaatgaactttagatgcggaggttttataatgcaaccagaatatgtcgctggagataaacgccgtgaaacgtaaaagcctggaagacgcgccgtgcccggtggcgcgcacgctggatgtgattggcgactggtggtcgctgctgatcgtgcgcgacgccttcgacggcgtcacccgtttcagcgagtttcaaaaagggctggggatggcgaagaacattcttgccacccggctgcgcgccctggcgacgcacggcgtgctggagatcgtgcccgccgcggacggcagcgcctatcaggagtatgtgctgaccgagaaaggccgcgcgctgtttccggtgatcgttggcctgcgccagtggggggaagatcatctgttcgccgagggagaggcgcactcaacgctggtggaaagtgacagcggccgccccgtgccgcgcctgacaccgatcggcagcgccgggcagacgctcaccccgctgaatacccgagtggtgaaggtgggggaacgctttgagccgtcttttaacaatccccaattagcgataaaagaaacacttccaaccgaaatcgccgcacagatcgacgccgcatgcaacgtgctgacagaacaactcggcgagaaactcttgggcatccatctgtatggatccgcggtcgatggcggtcttaaacccaacagcgatatcgacatcttggtcgtcatcagcaagccgctgatgtcaaccactcgggccgcccttatgaaagctttgctgaccgtgtcggctccgccaggtgccgacagtatttttcgcccgctggaagtcaccgtgctggtacagaccgacatcaaaccctggcgctatccgccacgacgtgagctacagtttggcgaatggctgcgtgaagagttgctggtgggaattgtctcccccgccaccttggatcctgatgtggcgatcctgcttaccaaagcccggcagcatcatcgacatctgttcggcgcctcctttgaactcctgtatgacagcgtccctcgcagcgacttcatcgccgcgctcaccgataccctgagtcaatggaacgagcctgatgactggcatggcgacgaatgcaacattgtgctggcgctggcgcgcatctggttcagcgcggcgaccggtcggatcgcccccaaagatgtggccgccgaatggctgctggaacacttgccatctgaacaccagccggtactcagcaccgcgcggcgaatttatctcggacaagcgatagatgatctgcctcagcatcagcagccgttggcagcattcatcggctatgccaaaacgacgatcgcaagtctattgacgacaacagcatcgcaataagacgcaagcctgtcgacaccacttattgatgcagggacggattttgttcatggccgccgccccctgcatgattcgcttcgcagcgtcatccgggtaatgtatagtccgcgttttacggagaacccatgctgactaactcatccattcgtctgaacaaatacattagcgagagcggcatctgctcacgccgcgacgccgatcgatacatcgaacagggcaacgttttcatcaacggtaaacgcgccaccgttggcgcccaggtatttgccggcgatgtcgtgaaggttaacggtcagctgatcgaaccgcgcaatgaagaagatctggtgctgatcgcgctgaacaaaccggtcggcatcgtcaccaccaccgaagacggcgagcgcgacaacatcgccgacttcgtcaaccacagcaaacgcatcttcccgatcggccgcctggacaaggattcgcaggggctgatctttctgaccaaccacggtgacctggtcaacaagatcctgcgcgccggcaacaatcacgagaaagagtatctggtgacggtcaacaagccggtgaccgacgagtttattcgcggcatgggcgccggcgtgccgatgctgggcacggtgaccaaaaagtgcaaggtgaagaaagaggcgccgttcgtgttccgcatcacgctggtgcaggggctgaaccgccagatccgccgcatgtccgaacacttcggctacgaggtcaccaagctggaacgcacgcgcatcatgaacgtcagcctgaaagggttgccgctgggcgagtggcgcgatctgaccgatgacgagctgattgaactgttcaagctgattgaaggctcttcatccgaggccaagccggcgaagaaggccccggccaaatccgccgcggcgaaaaagccgagcgccggcgggccgaaaagcgccgacaaagccgctgcgccggccggccgcaagcgctttacccagccggggcgcaagaaaaaagggcgttaaacgccttcccccgttcagcccgccgttgcgcgggcttttttatcgtgaaagtcagccacaggccgccactgagttctcaccataaaaaaggcccgcatcatgcgggcccgtcggtaccagagaagtctagagggaaaatcagaacgaccagcgcaggttggcgttgaccgaattaacgcgggtatcggcgccgaattgcccctgatagccgacatccagcgacgcagcgcgcgacagcttcacgctcacgccgatatcgcccaccatcacgttgtcatccacggcctggccctgcgtgacgaacgcgtcgctgccggcaaacgccatgcgcgatgaggtgttcttatcgccgtaggcatgctgccagccgagcgagccgtagaggctgacgttcttcggcagttcggtcacgccgcgcaccccgagcgtggagtagaaggtgttcatcgtttcattgcgcacgctcagcgccgccgcgccacccgactcctggaagctgtcggtatgcagtcggatgtagctcaggttgatgaacggttcgacgttcatctccggctggccgaaacggtaacccgcttcggtgaacgccagcagcgagttggcgtcgtaatccgacttcagccgatccgagaagccgctgaaatcgacgttgcgcttgccttcaatcttgtgccaggtgtaacccaacgcgccgcgcagcgagaacgcatcctgctgcccggccgcatacaggccgaggtggtagttgtcggtatcggccttggaacggcggctgtcgacgtcatagtcgccgcggctgtaaccgaagtagccgccgatgcgcacgttatggtccgccagtttgcgatccgcccccaacaggaagccggtggtgttgccatccagcttgcccacgttgccgttgccgctgtttctgccccaggaactgaaggtctgcccccagacgccgctgttttgcgcctgcgccggttgcaccagcgacatcgccaacggcggtaccggcagactgtcgttgtcgaacaggcgcagcatgcgctggttcagcacattgaacagctgggtgctgccggcgatcaggttagactgcatcgacggatagacttcgccggacagctgattgaacgcctcgcgcgcttccggcgcgctcagcagcagcagcgagttgtacagcgccagcgaaggtccgctctgcgtcagcgtcgagagcgcgccggcggtattccactggttgccgctctcggccaccgtttggaaaatgcccggcttgccgctgcctggattctcgccccccggattttccccgcctgggttttctccgcccgggttctcgcccccaggattctcaccgcccgggttttctccgcccgggttctcgcccccaggattctcaccgcccgggttttccccgcccggattctcgcctcctggattctcaccacccggattttcaccgcccgtatctttctgcgcgatggtcagatccacggcgttggcgctgtggttcagcgccacatcgaggaaggcagacttggagaccgccgacgcgaactggccgtcaatgccgccgtccgaggtcagaatgcggtagctttggccggttttatagctggtttgcggatccagcgccgtcacctgcactttggcctgatcgctgatggtggttttgcccgccaccagcagctggtcgctgcggccgtcgccggcgatatcaacgtcgtagaaggattcgccgataaagttcaggtagcgtttcagcgtcaaggtgccgatattgccgtcgccgggcgagatatgaccgccggactggatctcggtctggcccagcgtgccgttgccgcccagcgtgccgccggccttgatcgacgcggcgctgctgtaaccctgcccgttattgacgtcggaacccgccgtcgcattcaggatcagcgtgccgccgttctcggcgccgagggtttggatctcgaagatgtcgtcttctttctgggtattgatgtcgctggcgatgatgagcttgccgccgcgcgcggtgacgttcgcctgcagctcagagagatcgccgttcagcgtcgtgtgcccggcgctgttgatcacctcgccttcgccgctcatcttgttgctgaaaacgtaattgccgtcggtatggttaaagtacacatagctgcggaacaatccgccccgcagggcgatcgccgtctgggcatcgatggctccagcagcgcccgccgcgccgagcgtcggctcggtcaacccggtgccggtgtccatgttgccgcggctgccgataatcagcgcgccgcggttcgagccggaaccggtctcgcccagcaccacttcgttgccgccggcggagaatgtcccgccgtccatgaccgccaacacgccgttgccgtaatcgccgacgttgacgctgctgccgctggtaaagcgcgagccgttgccggcgaccaccagctcagcggttttacgcgcgcccgagacacccgccacctggatgttgccgacgttgaccgcagcgccgttcagcacgtccagatcgccgtagagcgtgagcgcgcggccgacgttccactgggaattggccccggtgaccgtggctttcgggctcagcgtatcagtctcacccggtccgctgccattgccgatgcgcgcgtcaaaggcggtgttcagcaccgcgccgtcttcgatcgccagcgtggatcgtgcccctaaatcggtgccgacactgagaaaattgctggtgacgcgagaaccggcgccggtggcgatcaggtggctgtcgtagccacgggtggtgccgaccacgatctctttcgcgctggccagcgcgccgtcttcaacccgcagggtgccccgccccagattcaggccgccgcgcagcacgaactgatcgttcaccgcgttcagctcggcgttcggcccgcgaaccgtgaccacgctgtcgtgaatttggccgttgaacatccggccgatattgatgttataggcgctgatcttgccattctcgatcagcaggttgccgctttgattacggccgacgtaaacgtccccggtgtaggccaatgattcggtaatttttgagtcgccgtcaaaaatggcatcgtctgcgcgagcgagatcggcgggcgccagcatcaacaacggcgcggaaaatagagcgaggtaaagtttggaaagcggtgttctaaccgctaaagggtgcgatgttttgtcattcacgggctatctccgtactcgttagcgtgatgtcgcgaaatttattgttatagggaactcaatacactagaggagaagtgaggcgttatttcgcgcacgccggtttagtgatcgtcgaagcaaaagcttattgccccccggcgctgacgctccgacgatgaaaaaccaggaagcggtaataccgcccccaaagcgaattatttatgcgtgaccaccggtgtacaggtcggcgcgctcagcgacggcgaggaacctaaaattcccggcatcatcagcgacgagcaatcgaaaatgcggcctttttccgtggtggcgcgatatgaaagtttttggccgcccagcgcatccggctgtgcgccattgacgttggtcacggtaatttcgtccgacgatcccagccccagcattttggcggtttccgcctgcagtaatggaatggcctgatcggttttcaaggtggaacaaccggctaccatcatcgtaacggttaaagcgataagtggtttcttcataaattatcctttataaccaatcagttaaaattaccgattggctttatgttttctcttatccaaatcctcgaataatatatttccctttcctaaacgaaaaaaccctcctaaagtagggagggttgataataattcatcagacctatctgatatttgaaggcgaaaggagaatcctttggggcaggattatgcgttggtcgttgatgaccatccattggtagcaagcggcatcgccaattttctcagcacgcattgccgattcaaacaggcgcatgtggtgaccaatgaagagaattgctaccgccatattagggaaaatggcccaccgcgtttactggtgatcgatttttggctttcttccggtacagcgttgaaattactcaaagaagtaaagcaactttaccctcaggtgcggatcttggtggttagcggcgacgagaataacgatatctggcagaaagtgcacactgccggcgggcatggatttgtattaaaaaacgaaccgcctgaattattcgccagggcggtttttgcgttgaataataatcaggattggttccctgacggtaatgaaacctgcattaaaagccatcatgagcacttaaataagttcaatttaacgccgaggcaaatcgacgtattaactatgatgctgcgcggcctgccaaataaaagaattgcgacgcaactgtctatttccgaacccaccgtcaaagaacatatcagcaatatattgaaaaagatcggcgtcaacagccgggtggaagccatcacgctgttgcacggcaaacgggatccgtcgtcatgaggtttttccagcatttacaaaatgatggcatctccccacgcgcgcagatccgcctgctggacaacaccttcatgcggctggtgttcagctttaccgccgtgcctttcgtcggcatccctttcgccatctggatttatttgctgggtgatgaactcggcccaaccattgcctggatcatggtttacctgctatgcgccgtggcgatccgaatatggcatcggcgctatctgcgcgaggctaaagaaaatgatgaagacaccgtgctgcgccgctggctgccgcgcattaataaggtggcctttattcacggcttggggatctcctcactctatttaattacgccgcagacccataactttgacttttttctgctgctcaatatcagcatcgccgcgatcgtcgccgccaacgcaacgcacctgacgccggtcatcagcacctttacccgctttttcttcgcctcctgggggctgctgaacctcggcatcatctggcggctggaagacgtgatgttcatcgtgctgatgctgaacttgctgtacggcttcgccatttaccgccacgcgttaacctcgcatgcgttctttattcagcaggcgctgctcgaagaacaaagctcgcgcctggcggagcagttccgtcaggccaaagaagaggcggaacaggcgctgctggataagaaccagttcctgaccaccgccagccacgatctgcgccagccggtgcacgccatgggctttctgatcgaagccatcatccacaaaaacctcgacgacagcctgatgccgcagttgctggatctgcaacaaagcgtgcgttcggtgcatttgatgttcaattcgctgctcgatctcagcaagatcgaatccggcaacgtgcgcaccgccgccacccatgtggatatcggcgccctgctcgactcggtggtcaccctgttccgcgaagaggccaacagccgcgccctggcgctgcgcacctggcggcccaaacggcgcatcagcgtgatgggcgatccgctgctggtgcggcaatcgctgatcaacctgatccagaacgccctgcgctacacgcaacgggggggcgtgctgattgccatccgcccgcgcggcgccgagtgcctggtggaagtgtgggacaccggcgtgggcatcgccgacgaagagaaaagcaaaatcttctccccttactaccgccccgagctggcgtggaaaatcgacagcgccggccacgggctggggctggcggtggtggcgcgctgcgccaagctgatgaaggtgaagtacggcatgcactccgtcgaaggcaaaggctcacgcttctggatgcgcttcacgcaatacatcggcgaagataaagcgccggaaaccgccgccgcctacgacaacaccgccacgcctacccgctatgcaccgctgcgcggcgcctgcctggtggtggacgacgatcctttggtgacctccgcctgggagagcctgatgagcacctggggcatcaccgtgcgctgcgcggcctccgccgaggaagccttcgccattgtcgacggcggcttcacgccgttcgccgtgctgtgcgaccagcggctgcgctccggcgagagcggcttcgacatcctgcaggcgctgttcgaacgcctgccggacgtgagcggcgcgatggtcagcggcgagttcaattcgcaaatattgcaagaggccgagcaggaaggctatctggtgctgcgcaagccgctggaaccggccaggctgcatgcgctgctgacgcagtggggggctggctagcgcatattgagggctatcaggccatgattaaacgcttaaacagcagctgctggatatcctgccgatgtgacaatggagtcaatacagcgccttacggtacgcgtgtactccaaggccacccgctgttccattgcaatcccttaatgctgagcactgtagtgcttaaagcccatccaacagcggttccttcgagaatacgcgcccttccgctttatccttctctgacagcgtcagcaatttcagcagagcaatggcgttctctcgctcctgctgctcataggattctataacgtagttgatggcctctactttcattatgccccctggtgctaccaatcataccaaggtccgaacataggccatatttagaccacaaacaataatctgctttacccatgactggaaccaggcggaaaagatatggccatataaagaaaaaccctctgtaaaaacagagggtttcagtcacgtcggcctagttacgaacaggctgtgaagggattaatcattcccactcaatcgtcgccggcggcttgccgctgatgtcgtacaccacgcgggagatgccgtccacttcgttgatgatgcggttggagacgcggccgaggaagtcatacggcaggtgcgcccagtgcgcggtcatgaagtcgatggtttctaccgcacgcagggagaccacccagtcgtatttgcggccgtcgcccatcacgccgaccgagcgcaccggcaggaacacggtgaacgcctggctgactttgttgtacagatcggctttgtgcagctcttcgatgaagatggcgtcggcgcggcgcagcagatcgcagtactctttcttcacttcgcccagcacgcgcacgcccagacccgggcccgggaacgggtgacggtacagcatgtcgtacggcaggcccagttccaggccaattttgcgcacttcgtctttgaacagctctttcagcggctcgaccaggcccagcttcatctctttcggcaggccgcccacgttgtggtgcgacttgatcacgtgcgctttgccggtggcggaagcggcggattcaattacgtccggatagatggtgccctgcgccagccatttcacctgctcttgcttgcaggcttcttcgtcaaacacttcaacgaacacgcggccgatgattttacgcttggcttccggctcgtccacgcccgccagtgcggtcaggaagcggttttccgcctcaacgtgcacgatgttcaggccgaagtggtcgccgaacatttccatcacctgcttggcttcgttcaggcgcagcaggccgttgtcgacaaacacgcaggtcaggcgcttgccgatggcgcggtgcagcaacatcgcggtgacggaggagtcaacgccgccggacagaccgaggatcacgtggtcctcacccacctgctcgcggatgcgctcgaccgcatcttcgataatggtggccggcgtccacagggcttcacactggcagatgtccagtacgaagcgctccagcatgcgctggccctgacgggtgtgggtcacttccgggtggaactgcacgccgtagaagcgtttttcttcgttggccataatggcgaacgggcaggtatcggtgctggcgacggtcacgaagtcggacgggatcgcggtcactttgtcgccgtggctcatccacacgtccagcagcggtttgccggccgggctgatggcgtcttcgatgtcgcgcagcagcgcgctctcgttgacgatttccacctgcgcgtagccgaactcgcgttcgttggagccctgcacatggccgcccagctgcatcgccatggtctgcatgccgtagcacacgcccagcaccggcacgccggcgttgaacacgtagtccggggcgcgcgggctgccggcttcggtggtgctttccgggccgccggacaggatgatgccgcttgggttgaattcgcggatctgcgcttcgctaacgtcccaggcccacagttcgcagtaaacgccgatttcgcgcacgcggcgggcgaccagttgggtgtattgcgaaccgaagtccagtatgaggatgcgatgcttatggatattttgtgtcatgtgaggcgaattccagcaacaagagaaaaagagcgaaaatgtatgttttcgggatggggcttggcgccccaccccggcctctcactcaggagaggttaaggcatcagcccatgcggtagttcggcgattctttggtgatggtcacgtcgtgcacgtggctttcctgaatgccggcgccgctgatgcgcacgaactccgccttggtgcgcagatcgtcgatggtggcgcagccggtcaggcccatgcaggagcgcaggccgcccatctgctggtgcacgatggctttcagcatgcctttataggccacgcggccttcgataccttccggcaccagtttgtcggcggcgttatcggtctggaagtaacggtcggaagagcctttggacatcgcgcccagcgagcccatgccgcggtaagatttgaacgaacggccctgatacagctcgatttcgcccggagattcttcggtgcccgccagcatggagccaaccatcacgcaagaggcgcccgcggcgatcgctttggcgatatcgccggagaagcggatgccgccgtcggcgataaccgggatgccggtgccttccagcgcttccaccgcgtcggcgatggcggtgatctgcggcacgcccacgccggtcacgatgcgggtggtgcagatggagccagggccgatacccactttcaccgcgctcacgccggcttcagccagcgctttggcgcccgcggcggtcgcgacgttgccgccgacgatctgcagatccgggtatttggcgcgggtttcacggatgcgctgcaacacgccttcggagtggccgtgcgaggagtcgatcagcagcacgtcaacgcccgccgccaccaacgcgtcaacgcgctcttcgttgccggcgccggcgccgaccgccgcgcccacgcgcagacggccgtgctcgtctttacaggcgttcggcttacgttccgctttctggaagtctttaacggtgatcatgcccagcaggtggaagctgtcgtccaccaccagcgctttttctacgcgcttttcgtgcatcttctgcagcaccacgtcgcgcgcttcaccttctttcacggtgaccaggcgatctttcggcgtcatcaccgcagtgaccggctgggtcagatcggtcacgaaacgcacgtcgcggccggtgatgatgccgaccagctcgttgtcttcggtaacgaccggataaccggcgaagccgttgcgcgcggtcagctctttcacttcctgcagcgtggtggccggagtaacggtctgcgggtcggtgactacgccgctttcatgtttcttcacgcggctgacttcttcagcctggcgctcgatggacatgtttttgtggatgaagcccaggccgccttcctgcgccagcgcgatggccaggccggattcggtaacggtatccatggctgcggacagcatagggatgttcaggcggatggttttggtcagttgagtgccgagctctgcggtgttaggcagaaccgtggagtgggctggaaccaggaggacgtcgtcaaacgtcagagcttctttagcgatacgtagcatgggcaatatctcaccagggtgggctgtgaaaaagataaaatattgccgcggcattatacagagcggaatcggttgcctccagcactttcttacaaaaagtcttgattacctttttcagccatgtagtatcgaccaattaagtgattgttttgaaatttgatctgggtcacatgtcgctacctgtttcgccttccatttttaccgtaagccgcctgaatcagacggttcgccaactgctggaaatggaaatggggcagatttggctctccgccgagatctccaacctctcccagcccgcctccggccactggtatttcacgctgaaagacgaccgcgcccaagtgcgctgcgcgatgttccgcaacagcaaccgacgcgtcaccttccggccgcaaaacggccagcaggtcttggtgcgcgccagtatcacgctgtatgaaccgcgcggcgactatcagctgatcgccgagagcatgcagcccgccggcgacggcctgctgcagcaacagttcgagcagttgaaacagcgcctgagcgccgaagggctgttcgatcagcagttcaagcagccgctgcccgccccggccaaatgcgtcggggtgatcacctccgccagcggcgcggcgctgcacgatatcctgcaggtgttgcagcggcgcgatccgtcgttgccgatcgtcatctaccccacctcggtgcagggtgcggaagcgccgatgcagatcgtgcgcgccatcgaggccgccaaccgccgcgatgaatgcgacgtgctgatcgtcggccgcggcggcggttcgctggaagatctgtggagcttcaacgacgaacgcgtggcgcgagcgatcttcgccagccgcattccgatcgtcagcgccgtcggccacgaaaccgacgtcaccatcgccgacttcgttgccgacctgcgcgcgccgaccccatccgccgccgccgaactggtgagccgcaatcagcttgagctgttgcgccagctgcagtcgcagcagcagcggctggagatggcgatggattactacctggcgcagcgccagcagcagttcacccgcattcaccaccgtttacagcagcagcatccgcatctgcgcctggcgcgccagcagacgctgctgttcaagctgcagcgccggatggaagacggcatgcagcaacagctgcgcctggccgcccgccgcagcgagcgcgcccagcagcggctggcgcaggtgcagccgcagggccgcattcaccgctaccaacagcgcgtgcagcagcaggaataccgtctgcagcaggcgatggagcggcagctcaacgcctaccgccagcgcttcggcgtggcctgcagccagctggagaccgtcagcccgctggcgacgctggcacgcggctacagcgtgacgcaaactccgcgcggcgaactgctgaaaaccaccaagcaggcgcaggtcggcgaactgctgaaaacccgtctgcaggatggctgggtggaaagcgaggtgaaaaccatcaccgtcgccaagaagccgcgcaagaaacgcgcggccgaatagcccctactccagcgtaaagcgctcgcccggttcgccgttcacccacagcgcgcgcgtttcgccttccggcaggctgagcgtcagcgtgcgccaggccgggcggaaatgcccttccgtcgtgatatccagcatgatgcgctgatggtcgcagcgcatttcccagcgcagccacagcgcatcgccctgccgccaaccttcgctttcgccgtcgtcctcaaacaacagcccgctgctcacgccgcaccccttgagcggaaacagccgcagctcgcgccgatcgtcggcagccacgtccacatgcgccagccgctgcgacaacggcagcgccgccccggcgcgcaccagcagcggcaaacgctccagcggcgccgccagcgtcaccgtctggccaccgccgaaccactggccgctgtagaagcagtaccagccttcgccgttgtccggtagatataccgaacgccagcgctgccccggctccaccacgctggccaccagcagatcgcggccgatcagaaaatcgtcgttctcgccaaaggtgcgcgcatcctgttcgtgatcgagaaaagtcgggcgcagcattggctcgtcgtcggcgcaggcctgccacaacagggtgtagaaatacggcagcagccggtaacgcaggttgatcgcctcacgtaccgccggggtagcggccgggtacatccagggctcattgaccgtggcgtcgtcgttccaggagtggatggtgaaacgcgggtgcatcacgccgttttgtacccagcgcaccagcagctccgcgtccggtttgtcgccggagaagccgccgacgtcgtggccgaggttatacaagccggacaggctcatgcccagccccatgcggatgttgtagcgcagcgtctgccaactggtgcggttgtcgccgctccaggtctgcacatagcgctgcatgccggcgcagccggagcgcgagatcaggtacgggcgtttctgcggcgcgaagcgctgctgggcctccatcgaggcgcgcatcatcagcagcggcatcaccgggcggatgtgcttgatggcgatcggccgcccgaagccgtgacagcgcgcttcgccatcccacacttcgtactcgttgttgtcgttccaggtggaatcgatgcccatctccagcagctgttgcgtgacgccctgctgccaccagcgtaccgtcgccgggttggtgaagtcgaggtgcgatccttcatcgtcccagaagctggagcgttccggcgcgtcgctttgcgaatcgcggataaacagcccctgcgccgccacctcttgatactgcggatgatcctgcagcaggcacggcttgatgttggccgccagcctgaggccggcgtcgtgaaacgcctggctgagcagcttgggctgcggcaccttgtcgtagttccagttgaacacgtagcgtttgtggttgatcgaggtgtagcccgacgacagctggaaggagtcgcagggaatggcgtgctggcggcacagcgcaatgaactgctgcagctgctgctgggcgtccggcgcgtcggtgtagtgcatggtcgagccgctgtagcccaggctccacttcggcccgaagtgggtgcggccggtcaggcgcacgaaggccttggtgacgtccaaaaccttcggcccgaggaacaggtagtaatccagatcgcccgcttcggcctgatagcggcgataggccgcgtggtaattgtcgatctcgttgcccagatccagccagcagctgctcaggttgtcgtagaacagaccgaagctcgcctccggccctcgggtgatggtgaacggaatgtgcttgtacagcggatcggtgctggcggcgttgtagcccatggcgtccagattgcgcatctcgaagcggcggccggtgcgttccagatcgccggctttctcccccaggccgtaatagcgctcatcggcaaaacgccgctggtagtgcgccacgccgtcgccgtgcgcattgagcaggtaggcgctggtcggccgatccgccgccagcggccgccactcgccggcggcattgcaatgctcccattccaaccacagcggctgatgcaccgtcacgcgcagcagcggcgtgctgaccaccagccgatcgcccgcctggcgcagctgatagcccggcaggctgaaaccggcgacgctgagccgatcgcgcccctcccagggcacatcgttctgcggcgcgatgctccaggtgcgatccagcgccagctcgccctcacgtttgatcaacacgcggaacaggccgtcttccagcacgtacaggcagaaacgatggcgttcatcgaccagcagctcgacatggtcggcatgctgcgccgccaatgtccaatttttcaaggttttcatacatattccacttagctgtgtgaaggggttttcttaccgccgcgctcggcgatcagggcaatcaggaacacagcgccgatcagatcgaagaagcccatcgcgatgaacagcgggttgaagccgatggtgtcggataccgcgccgatcagcagcgtgaacaggaagctggcgatccaggcgctggagccgcgcatgccgttgaccgtcgccatctggtttttatcgaacgattccaccaccagggcgctgagcatgcaggagatcacctgatggccgaaaccgccgatcgagatcagcgcgatcgccacatagggatcttgggtgatcgccacgaacgccagcgacaccatcaggaaagcgccggtcaccgagctggcgaccaccgagttgacgcggctgcagccgaaccatttgcggtacagggtggtgagatagccgctggcgacgctgccgatatccgccgccaggaacggcagccaggcgaacatcgcgatctgtttcagatccatgccgcgttcggtggccaggtacagcggcacccagaaactgaagaccgcccaggccggctcggcgagaaaggccgggatggcgatgccgtaaaacttcttgttcttgcacaggctggccagcgaagtgaaaaacggcagcttcggcaacaccggctcgttgtcttcgcggatcagatccagctcttgctggctgaggttcgggtgctgctgcggggagtggtagaacagccaccacagcacgacccagatcagcgccagcccgccggagaacaggaacgccccctgccagccgaaggagacgtgagcgataacgatgatcggcggcgccaacatggcgccgatggagaaaccgacgcccgcccagccggcggcgatcggccgctcctttttcgggaaccagtcggagatcgccttggcgttggccggggtggccgccgcctccgcgccccccatgaagaagcgcagaatggccagttgcagccagctgccggcgccggcgtgcagcatgcataccaccgcccaaatgccggcgcagatcagaaagcccatcttcaggccgatgacgtcgatcagccagccgcagatcggctgaaataccgtataggccagctggaacgacgccaccacccaggcatattgctcggtgctcatgttcaggctggttttcagctccggcgccagaatgcccagcgagttgcgggtgatgtagttgaccgtgacgcccagcaagaacagcgccagcatccaccagcgcagcgatttgaacttgcgccggccgctctgcgcgaccgcctgattgatctccacactcatcagttctctccccgcggccgcctgtgacagcgacgcgcgcattggtaaggtacgttgcgctatcaaaagggggacggtgaacacaggccaacgctcgcataacagaccggcagtccatcacaaccccatgatttattttttgttttctttttcgcacaccgttaaaattggactgacatgtcccaaaattggtgtaccaatgcagactactcagcgatagcgcacagcgaaacggggttttttgcaaagattttcacaagcgggtgaaaaaatagtcataatggccgacaaagccggtaaaaatgctgaaaatccgtagtgaaaatattctcacggatgaatttgaaggagatcacaaaatgaacggaaagctgaaaatccaggagatcgcccgccaaaccgggctgtcgatcagcaccgtttcccgcgtgctggccggcaaggccaacaccagcgccgaggcgcgccgcaaggtgctggactgtgcgcagcaaaacggcattctgcagggcatttccagcggccggctgatgctgaacaacgtgatggtgttcgcgccgcagcgcgcgttcgacgtgcgcaccgatatcttctactacaaggtcattcagggcattgccgccgcgctgatggagcatgaggtgcgcatccgctactgcgggctggaagagcagcgcagcgacggcgcgctgtttctggaaaagatgagcgatccgcacaccgaagcggcgctgatcatcggcatcgacgacgagcatatccacaccctggcggccgatctgcacaaaccttgcgtgctgatcaactgcagcgatcggcagatgcggctggacagcgtctcgccggatcatcagttgatcggcgattactccgccagctacctgttccagcaggggcacagccatattctcaacctgcagtgtctgcgccgccacaccatggagctgcggctggcgggcatccggcaagcctacgcgcggcatcatctgccgttcgacgacggccgccatctggtcaccacctccggcttcggcagcgaagaggccgagcaggcgctgaccacctatctcgatggcatccacggccacgccccgctgccgacggcgatcctggccggcggcgattacatggcggtcggggcggtcaaggcgctcaacaagcgagggctgaacgtgccgggcgacgtgtcggtgatgagcaccgacggcttcaacctggcggaaatccatgacgtgccgctgacctcggtgcaggtgccgcgcgacgaactgggttacgaggcgatccaactgctgcagcggcgcatgctgcgcgccgacgcgccgccgtgcaacctgctgctgcacggccggctggcggtacgcgcctcggtgcggcgcatcagcccgcacaagactgcgccggcggtgagcacgcatgaccacaggctttatgacgagtaggctacacttaggcacagtgcattcattcgatgaggtaaaattttttgcctaaggagagccactatgccagcccagcgcatgcgttccgtcattcctccctacatgctgcgccgcatcattgaacacggcaacgccccgcagcgcgactgcgcgctgcacaccctgaaccacgtgcaaagcctgctcggcaacaagccgctgcgttcaccgaccgagaaaaacgcccgagccggcgaagcgctccgcgatatctacgacgcccagaacggcacccaactgcccggcaaacaggtgcgtaaagagggccagcccagcaaccacgacgtggcggtggacgaagcctacgactacctcggcgtcacctacgatttcttctggcaggcctaccgccgcaactcactggataaccaggggctgccgctggtcggcagcgtgcactacggcaaggagtaccagaacgctttctggaacggccagcagatggtgttcggcgacggcgacggcgagattttcaaccgtttcaccatcgccatcgacgtggtcggccacgagctggcgcacggcgtgaccgagagcgaagccgggctgatctactaccagcagtccggcgcgctcaacgaatcgctgtccgacgtgttcggttcgctggtcaagcagttccacctgcagcaaaccgccgataaagccgactggctgatcggcgccgggctgctcgccaagggcatcaaaggcaaagggctgcgctcgatgtcggcgcccggcaccgcctacgatgacccgctgctgggcaaagacccgcagcccgccagcatgaaggattatatccagaccaaggaagacaacggcggcgtgcacctcaactccggcatccccaaccgcgccttctacctggcggcgacggcgctgggcggcttcgcctgggagaaagccggctacgtctggtatgacacggtatgcgacaaagcgctgccgcaaaatgccgatttcgccaccttcgcccgcgccacggtgaaacatgcgcaagcgcgtttcgaccagagcgtggcggacaaggtgcagcaggcctggcatcaggtgggggtggaataatgaaaccgctgccgacgctcaatcaggatacggtcattgagctggcgcgcgagggaggcttcgcctacattcccaaactggcgggccagcgccgcatcgcgctggccgatatcacgccggagcagcggcagcgcctgaatcagctgctgaaccagacgctgccttatgcgcaggaagaaggccagcccaactcccccggctgcggcgaccaacgctactaccgcatacagatcaactacaccagccccaccctgagcaccgagatcgtgctgttaatcccggaaagcagcgcgccgcaggcgctggtggatctgtggaaaaccggccaggtggatgagtgagggcttacagcggctgatagctgaaattcacccgctttttggagatcagcccgtgcccgttctggcacaggtaatccaccgccccgcaggctttcaattcttgcagcggctgcccgcactccgggcagctcgccagctgccgataatcgcgctgacaggcggcacaatggtagtgacccgctacccaattcatggtctgacgacagtgcggacagtgcgcgtccataacgactcccaggttaaatcgcgccccatgagcgcaaaaaatagatccccaacgcggtggtgaagaacgaaccgacggtggtgatggcgataatattggccgccagcgtggcgttgccgcccatggcgcgcgtcatcacatagctgcccgaagcggtcggcgtggcggaaaacaggaagataatgcccagcgccgcgccctggaacccgcacagccagccggccagtgtcatcaggcacggcaccagaaacagcttggccgccgacgacagcgccgccacgttggacgaacggaacatggcgcgaaaatccaggctggctccggtgcaaagcagcgccagcggcagcgacagcgcggagatatagctgccggtttggcggatcacggccgggatccccagcccggtttgcgcatacgccagcccgcacaccagaccgatgatcagcgggttggtgacgatgctgcgcagcagcgacaggtggctgattttcttgccctgcccgccctgcagactgcgcgtgagggtgatgaccgacagtatattgaacaggatcaccgtcaccgtcaggtacagcgaggcgagcgcaatgccttcgctgccgtaggcggtcatggcgtaggccaggccgacgatggcggtattggcgcggaagccgccctgcacgaataccccgcgctcacgcggttctttcaccaaccacctggccgccagctccaaaagcaggaaggtcgccagcgtgccgaccgcgccgaacagcaccagcggcaggttgccgagcagctgcggatggttggtggcaatgctgaaaaacagcaggcacggcagcgccagattgaacaccaggcgggtcgcaccgtcgacgaagcggtcatccatcaggcgccaatggcgcagcaggatccccagcagcatcatcagcagattcggcacggtgacgttaaacgcaaaactccaggtttcccaggacatggtgttccttcaggcaggcgaggtaatcttcagataataaaacgatttcgggccaataaaaaagggcgcggcatcactgccgcgcccctcataagcgattacttgctctttttcaggtggctcatcaggcgcttgcgcttacgcatctgggttggcgtcagcaggttgcgtttgccggcgaacgggttgtccccctctttgaactggatgcggatcggcgtccccatcacgttcagcgagcggcggaagtagttcatcagatagcgtttgtacgaatcggacagatcgctgacctggttgccgtggatcaccacgatcggcgggttataaccgccggcatgggcatatttcagcttcacgcggcggccgcgcaccaacggcggctggtgatcgtcaaccgccatctgcatgattttggtcagcatcgaggtgtttacgcggcgggttgcgcattcgtaggcttcctgtaccgattcgaacaggttgccgacgccgctgccgtgcagggcggaaatgaagtgcacgcgcgcgaagtcgacgaagcccaggcgcagatcgagcatctctttcacgtgctcgcgatcttcttcgctcatgccgtcccacttgttgaccgcaatcaccagtgagcgcccactattgaggataaagccgagcagcgagaggtcctgatcggaaatgccttcacgcgcgtcgatcaccagcagcaccacgttggcgtcttcaatcgcctgcagggtcttgatcaccgagaatttttcgacggtttcggtcaccttgccgcgtttgcgcaccccggcggtgtcgatcagcacgtattcgcgttcgtcgcgcaccatcggaatgtagatgctgtcgcgggtggtgcccggcatgtcatacaccaccacgcgctcctcgccgaggatgcggttagtgagcgtagacttaccgacgttcgggcggccgacgatcgccagtttgatcggcagatcctgcggattgaacgcttcttccggctcttcgtcttcttcgccttccagcgtttcgccgttttgctcggcccagtaagcggcgttggcctcttcctcggtcagctcgacgtcttccggtttttccggcacgaacggcaccagcacgtgttcaatcagctgggtcacgccgcggccgtgagaagcggcgatagcgaacacttcacccaggccgagcgagtagaaatcggcggtggcggtgtccggatccagaccgtcggtcttgttggccaccaggaaggtcgccttctggcggctgcgcaggtgctgggcgatgccctgatccgccggcatcaggccggcgcgggcgtcgaccatgaacagcacgatgtccgcttcttcgatcgccagcagcgactgaccggccatgcgcgtttcgacgccgtcttcggtgccgtcgatgccgccggtatcgacgatgataaattcattgccttcgatttcagcacgaccatacttgcggtcacgcgtcagccccgggaaatccgccaccagcgcatcacgcgtatgggttaaacggttgaacaaggtggatttacccacattcgggcgcccgaccagcgcgacgacaggtatcattgttgaagcctcattacttaataatcaatgcgttactgcactgtggatagacaccagcggtgcagcttataaaatacgaaacggcccctgaacactcaggagccgttttccccttcatctttcgcgccacagcggcgttgtctgcgcaccctcgcctcggtcactcagttcactgagctcccgaggactcatgcgcttgccgcctggctgcaacccgaaagctttcgggtgcaagaagggtcacgacgagcggcgttagcgggtgaaagcgtaaactttcccgccgcgagcctggatgatcagcttgtcgctggccaccatcggcgcagacaggaagccggagctgtccacttcctgctgggcgacaaaacggccatcggtggtgttgatccagtgcagataaccttcggcgtcaccggtcaccagataaccattatacatcaccggcggcgtcaggttgcggtgcagcagatcgctctgcgtccacacggtcacgccgccttcggtgctgagtgccactacgcgatcgttctggtcgatcaggtagatgcggcccgcgtcgacgatgaaatcattcaccgaacccagctcgcgtttccagataatctggccggaacgcagatccagcgccgtcaggttgccgttgtaacccagcgcgtagaccacgccgtcaacgatcaccggcgtggtgtccacgtcgttcagacgatcgatttcggtcgcgccgctcggctgagaaatacgctgttgccagataatctggccctgctgcatcagcaccgcactgacgcggccgttgtcaccgccgacgatggcggcgccaaaagcgacggccggcgcggattcaccgcgcaacgacagcgaaggcatgtccaggttaaccgtccacttcaccgcgccgtcggcttcgttcagcgcctgcagcatgccgttggaggtgtgcaccaacaccatgccgtcgctgacaaccggacgggagatcgcttcgccggccactttggtctgccaggcgatggcgccgtcggcggtgttcaatgcgtaaaccaccgctttttcgctgccgacgtaaaccttgtcgcccgcaaccgtcaggccgcccgacagcagcgcagacaggttgctggagaagaagccggtcttctcggagagattgaccttccacttctcgttgccgctgtcggcgtccatcgctttcacgatgccaaagcgatcggcggcgtaaatggtgctgtcctgataggccgggcgcaggtgggagtaatactcaccgataccgtcgcccaccgaggtgctccacgccttgctcggcgtaaactgattttcaactttcggcaacggcgacatggtaaccacgtcttcttcgctgttaaacagcgagcaaccactcagcaaggcagcggaaaccagtccgaccaagagtgttttacgcaattgcatgggaattccccttagctggacaagttattcaatttcatgcgcagcagaacctgcagcgcctgagaagcattggactcaatgcctttgctgtaagcttcgcgcgcgcccttggcgtcgcccttggccagcaatacatcgccgcgcacatcctgcatcatcgccacccagccttcgcctttcacgccatccagcgttttcagcgcttcatccagctttttctcctgcagctggacgcgcgccagacgcaggtcgatcatcgccaacaggttgtcgtctttggtctggccctgcgccagcaccaattgttgttccgccttggcgaaatcattctgttcgacaaagtgcttggccaactgcagcgcggccagtacgccgtagctgttgccgttagcctggacaaatttctctgcggcagccacgtcatccggcttgccggccgccagacgatcgctggcttcctgataggattgcgatgccgccatcatgttggagttttcatggctctgccaataacgccagccaaccagggcaccaattccgagcaccacgcccaccgccagcgctttgccgttctcggcaaagaaccgacgcagtgcgtcgacttgttcgttttcagtggtatagacttccacggtgtccttctccttaacctaacatcaaagccagacgcgcagcgacttcgctttgcgccagcgtttcttgttcaccactgcgcaggtctttcaccaccacctgctgcgccgccacttcgctctcacccaggatcagcgcgatgcgcgcgccccatttgtccgcacgggtgatctgcttcttgaagttgccgccgccgtaattggtcatcagcttcagctgcggcgccgcgtcgcgcacctgttcagccagccgcattgccgcactctgggtgcccgcgccggaagaaatgacgtacacgtcgatagccgacggcgccttgaattccgggttgaccgcctgcaccagcagcaccagacgctccaggcccatggcgaaaccgaccgccggggtggcgcggccgcccagttgctcgaccaggccgtcgtaacggcctcccgcgcagacggtgccctgcgcgcccaggctggtggtcacccactcaaacacggtgcggttgtagtaatccagaccgcgcaccaggcgctcgttaacggtatatgggatacctgcctgcgccaaaagttcacacagaccggcgaagtgagcacgggattcttcatccaggtactcggacaggcgcggcgcgtcgttcagcagcgcctgcacctcaggattcttggagtccagcacgcgcagcgggttgctgtacatgcggcgtttgcagtcttcgtccagcacctcgacgtgctgctccaggaacgccaccagcgcgtcgcggtagttggcgcgcgcctccagcgaaccgatggagttcagctccagcgtgacgtgctcggcgatgcccagcgctttccaccagcgggcggtcagcaggatcagctcggcgtcgatatccgggccttgcaggccgaacacttccgcgcccagctgatggaactgacggtaacgccccttctgcgggcgctcgtagcggaacatcgggccgatgtaccacagacgctgttcctgattgtacagcagaccatgttcgatgccggcgcgcacgcagccagccgtcccttccggacgcagcgtcaggctttcgccgttgcggtcttcgaaggtatacatctctttttccacgacgtcggtcacttcgccgatcgcgcgtttgaataacggggtctgctctacaatcggcaaccggatttcgctgtaaccgtagccgcccagcacctgcttgagggtgccttcaatacgctgccataatgccgtttcttccggcaggtagtcgttcatgccgcgaatggcttgaatgttctttgccacgtgagttctctgtccgttgtctgtaaaaatgaacccgattatagggactttgccgcccggtattcaacgcggatgcggttttctgcccttcaggttcataaacaagcgggccaacaggcccgccgtgtagcgataacgcttatttttccagcaggttgaccgtgatgcgtttgctttcgtccatcatcgcggccttggcgcgaattttcgcttccagctggtcgatcatctgttcgttgtcgaaacgctctttctggcgcacgccgtcttcatagaagccgctcttcttgtggccgccggttacgcccatggtggacaccagcgcttcgcccggaccgttcaccacgcagccgatgatcgaaacgtccatcggcgtgatgatgtcttccaggcgctgctccagcgcgttcaccgtgccgatcacgtcgaactcctgacgcgagcaggtcgggcaggcgatgaagttgatgccgcgcgcgcggatgcgcagcgacttcaggatgtcgaaaccgaccttcacctcttcgaccggatccgccgccagcgagatgcgcagggtatcgccgatgccttcagacagcagcatgcccaggccgatggccgatttgaccgacccgctgcgcgcgccgccggcttcggtgatgcccaggtgcagcggctgatcgatgcgcgacgccagcaagcggtaggattgcaccgccaggaacacgtccgacgccttgacgctgaccttaaactggtcgaagttgaggcgatcgaggatgtcgacgtggcgcatggcggattccagcagcgcttccggcgtaggttcgccgtacttttcctgcaggtctttttccagcgagccgccgttgacgccgatgcgaatcgggatgttcttgtcacgggcgcagtccaccaccgagcgaatgcgcgattcgttgccgatgttgcccgggttgatgcgcaggcagtctacgccatattcggccacctgcagtgcgatgcgataatcgaagtggatatcggcgaccagcggcacgttgacctgctgcttgatcagtttgaacgcctcggcggcgtccatggttggaaccgaaacgcggacgatgtcgacgcccacgcgctccagcgctttgatctgattaaccgttgcttcaacatcggtggtacgggtgttggtcatcgactgcacggcaatcggcgcgccatcaccaataggcaccttgccgacgtaaatgcgtgtagattttcgacggttgatgggcgcttggttatgcattacttactctccattgctgctctgacatcacgaccggtgccgcgcgattactgcgcggcgacggtcaggcgagcaacacggtttgacttaacgaaccggcttaaatcaaccggtttaccctgatactggatctgaactgccgccggcgcaccgatggtcagtttatacggcgcagtgccggtcaggttcagcttgccgccttgcttctgggtgccgctgaacagcgttttaccgctcgcgtcggtcacctgcagccagcagtcggcggagaaatccatcaccagcgcgttcggatcggccgccggcgcagccacgcccgcatcggcggtcggcaacggcgcttgcgccgccggcgcggtttccggcagggtggtctggcttggcgacaccacggcaggctgctgctgagccgcgctcggcgcctgggcggtcgccgccggcgcctgagccgctgcgccggtatcggccggcgcggcgctgttgtcggtcaacggcacgttggtgccggcgtcggcattgccgtcggtcagcggcacggactgcccttcgttattctgtgaaagctgcgccgaggattgatcggccatggtggcgatctcttcctgctgcgccttgtggttttgccaccaccaggcgccggtcaggccgatcaccacgaacacgataagccaggtgaagctcatcagccagccgtcgcgtttcttgcggcgcttgcccagcgagaaactttgcatcggcgccactttcgccatcttcaacggcgcctgcttggccaacatcggcagcagttcgtcttccggcagatgcaccagcttggcgtaggaacggatgtagccgcgcacgaaggtggacgcgaggtcagcggacacgctgtcttcctcgatatcgcgcacggtggacattttgagacacaggcgttctgcaacggtctgttggctcagcccgagttgctcacgggcctgacgcaggcgctggcccgtcgtcatggatacggttttatcttgggaggcttcagtattcattagctaagaactgctggtactgtttggattgtggaaaacttcgcgctagctgcttgccatagcgttgaacgctatcctggcggccggctaacgcggcgaaacgaatctgtaaccataagctgctggcgctggccggcagaacatgctgataaacatccaataaaagttgcgactgggcgcgcttcccttctccaaattgcttttcggcctccgccagcagcggagcgcctttgtccggatcgactttcagcgcgcggctcaacagcgtgcgcgcttcgtcgttttgtccggccttgagaaaacagtaacctgcgttttccaggctgtcggcgacctggccataatcgggcgccagcgccgcagcgctaaactgctgttgcgccggtacatactgccctaaaccgcaaagaaacgcaccgtaattattcagtacggtgccattgcccggcgcaagtttgagcgcttgccgataacgctgttcggcctcggcgttttcaccgctgcgctgcgcgtagagcgccatgcccaactgcgtgcggtaatcctgcggggccgcgtccagcgccttttccaggttctggcgcgcggcgtccatgtcgccttgctgcaggtactccagccccagctgcaggcgcgtctggcccgcctcagagacctgtgcttccttttccggcgctgaaccggaacacccggccaacaacccggccgccagccacataccccacagtttcagcttcatgcccgcattcatttccttatcggccgtcagctaacgcccgccagcgacacgctttcgcataacaggctgttagataacaaaaaatggtgctataggattcagaccgcccgtacgttgataggttccccggccattttcttcttcagggtacgcttggtacggtcgatcacttcacccgccagttgcccgcaggcggcgtcgatatcgtcaccacgggttttacgaacaatagtcgtaaagccgtattccatcaacaccttggagaaacgatccacccggctgttggagctgcggccgtacggagcgcccgggaacgggttccatgggatcaggttgatcttgcacggcgtgtctttcagcacttccgccagctgatgcgcgtcgtcggtgctgtcgttgatatgatccagcatcacgtactcgacggtaacgcggccctggttggcgttggatttctccaggtagcgacgcaccgcggacaggaaggtctcgatgttgtacttgcggttgatcggcacgatctcatcgcggatggtgtcgttcggtgcgtgcagcgaaatggccagcgccacgtcgatcatgtcgcccagcttgtccagcgccggcaccacgccggaggtagacagggtcacgcggcgtttggacaggccaaagccgaaatcgtccagcatgatttccatcgccggcaccacgttgttcaggttgagcagcggctcgcccatgcccatcatcaccacgttggtgatcgggcgttggccggtcaccttcagcgcgccgatgatcttcgccgcgcgccacacctggccgatgatttccgacacgcgcaggttgcggttgaagccctgctgcgccgtcgaacagaatttgcactccagcgcgcagcctacctgcgaggagacgcacagcgtcgcgcggtcggcttccgggatatacacggtttcgacctgctgatcgcccaccttgatcgcccacttgatggtgccgtcggccgaacgctgttcttccgccacttccggcgcgcggatttccgctacgcgctgcagcttgccgcgcaggactttgttgatgtcggtcatctgctcgaaatcgtcgcagcagtagtggtaaatccacttcatcacttgatcggcgcggaacggtttttcgcccatttcggcgaagaactcgcgcatttgctggcggttcagatccagcaggttgattttggccgcagccggttgctccacgttaacggagggggtagtcagcgaattattttcagacacggtgtgctcggacgtgatgggttctaacataatgatctctggcctcgttattacacgttatggcgctaaagaatggaaagtaagttgtgcatttcagcccgcgagattcgggtggcggcactaaaaacacgcccctgacaagtcgtcttatcaggggcgcggcattgtacaaattttagtagcgggtttctatggctgaaaggcattcagggcatttttattgtttcagccggtgaatgcctggctatcagctcagaaacggcacgattaacgtgcgcagatttcgctttcgttgaagaagtaagcgatttcacgctgtgcggattcaacggagtcggaaccgtgaacggcgttagcggtgaagctgtccgcgtagtcggcgcgcagggtgccggccagtgcgttgtccgggttggttgcgcccatgatgtcgcggttgcgctgcacggcgttttcagattccagaacctgcaccatgattgggccggaggtcatgaactctaccagaccgtcgaagaatgggcggcctttgtgctcagcgtagaagccttcagcttgctcgcgagtcagacgcagcattttagcggcgatgattttgaaaccggcgcgctcgaaacgcgcgtagatagcgccgatgtcgttgttggctacagcgtttggtttaacgatggaaaaggtacgttctacggtcatgatggcctctgtatgacttccaaaacaggccggtctgcaatgttgccggccttctcaagtggcgcagattatatgtgcgccgttaacgcttgcctacgggaaaatcaacatttcattaaaaaaatatgatcttcattcgccactttcagcggcgcaccgacgttattgggtcttgtcggtagacgggatcacattgcgcagccaactgccccagcggcgctgataaaacggctgcgtatgggcgatcaggtagtggctgatgccccgctctttctccgataccaggcagaaatccaccggttcgtcattcggcgccgtttcgctggcgacgctgccggcctcgttgatcaacgcctcgatctccgccggctcggcatccacttccagcccgatcagcagattcggcttctcgtccgccgcctggtcgtgcatcagcgccagaaacgcgcggcgcaccggcttgcgctggctgaacagcgtggtcagcgcatccaccatcgccgacggatactcttcgggctgccccagcaggatttgggtctctttgtcgacgtagtgctccaccggtttgacgacgccgccggtcgccagcagcatcgccacctcttccgggtagaactctttgccgtattccgccttcgggttgaggaacagatccgcgccctgggtgatttcaaacagcacccgcgccggcatggcgatgaacggctgttcatcctcaacggccttctgcagcgcttccagcgaggtgaagaacggaataatgctgccgccgtcctgtttttcccaatgctggatattgaccggcgtatccgcgttcagcgtaatgtcgccgtcctgctgcacctgctcgctgtcgccgaggatcagcaccgtggcctcgagcagttcacggaagaacgccgggcggtgggccggctccgtcaccgccagcttcagcaggcgttcaagttcgttctcgctcggggcggcatcgtgatgatgggcactcatggcaaactccagggatcaaatagcgaggcccagcatgctgggccccgaagataatgcgcattctagcgcccgacgcggcgggcgttcaattatttggctttgctcagcaacagattggccagggtgcgcacgcccaaaccggtcgcgccggccgaccactgatccaccgcgcctttgcggtaggtggcggaacagtcgatgtgcaaccagccttgctggtagttcttaacgaaatgcgacaggaaggccgccgcggtgctggcaccggcggtataggccgggccggccacgttgttcagctcggcgaagttggacggcagctggctgcggtggaactcggccagcggcagacgccagaacggctcgtgctcggcggcggcgctgctcagcagctcctgcgccagcgcgtcgtcaaagctgaacagcgcgtgatagtcgttgcctaccgccgttttcgccgcgccggtcagggtggcgcagtcgataatcagctgcgggttctgctcagaagcgtcgatcaggccgtcggccagcaccaggcgcccttccgcatcggtgttcatcacctcaacggttttgccgttgcggtagcgaatgatgtcgcccagtttgaaggcgttgccgctgaccatgttgtcggcgcagcacaggtacagcttcacgcgctgcttcaggccgcgcgccgccgccagcgccagggcgccggtgatggtggccgcgccgcccatgtcggatttcatcgaatccataaaggcgctttgcttcaggctgtagccgccgctgtcgaaggtgatgcccttgccgaccaggcatgcgaacaccggcgcatccgggttgccggtcgggttgaagtccaatgccagcagcaccggcgggcgctcggagccgcggccgacggtgtggatgccggcatagttctgctcgcgcagatcttcgcccttggtgatgcggtagctgacggcatcgcagccgacgtcgcacatcagatcgacggcgcgggtcgccaattgctccggccccagctcttccgccggcatgttgatggtgtcgcgcacccagtcgacgatcttcaggcgcttatccagttcctgacgcgcggcttccggcagctcgggccattcgacgttgcgctgccctttcggcccgcgatagccttgccagaacgcccagctgttttccaaatcccaaccgtcgccggccagcttgacgtttttgatgccctggccatcaattttgcggcccgcgcgctggatcgcgcccagcttgtcggcgccggtcaggtggatggtcattccttcgccgttggtgctcagcagcgctttttcgccccagcgggcgtcggcaggttgttgcgacagcgtgacctgcatgaattctgttgtcatagccttcttactccggattattcttttattaatcttgtcggatacaaaataaacgggccgcccatggcagcccgttacgctatttactccgcttcatctaaccagaccagcaggatcgcttccagtattttttcgttggaagcctgcggatcgtcatcgaactcttccagatcgcagatccactgatgcatgtcggtaaaacgcacggttttcggatcggtatccgggtattggtcgtacagggcttcgccgatttcacggctgtcggtccacttcagtcccattatgatctccgggttgatgctgcggctaacaattaatgctcacgcgcgtggttgacggtgtagcgcggcatttcgaccaccagatcttcgtcggcgaccagcgcctggcagctcagacggctttccggctccagcccccacgctttgtccagcatgtcgtcttccagctcgctgctctcttccagcgaatcgaagccttcacgcacgatgcagtggcaggtggtgcaggcgcaggatttctcgcaggcgtgctcgatttcaatgccgttgcgcagcgcaacgttgaggatcgactcccctttttcggcttccagaaccgccccttccgggcaaagatcttgatggggcaggaaaacaattttaggcatggttaaacctcatccacagaatggccagccagcgcgcggcgaatggaagcgtccatgcggcgcgcggcaaaatcttgcgtttgtgcatctaatgttttgatggcgtcttcgatagcggcgggatcttcaccctgcgccgcctgctgcaacgcctgggtcgcggcggcgatcgcctggctttccgcctcgctcagcagcgcggcgtcggtggccagcgcgccctgcaggctttccagcacccgcgcagcttccacgcgttgctccgccagcttgcgcgcgcccacgtcgctttgcgcattggccatcgaatccttgatcatgccggcgatttcactgtccgacaggccatacgacggcttgacctggatcgaggcttcaacgccggtggatttctccatcgcggtgacgctcagcaggccgtcggcatccacctggaaggtgacgcgaatgtgcgcgcccccggcaggcagcggcggcaggccgcgcagcgtaaagcgcgccagcgaacggcaatcctgcaccagctcgcgctcgccctgcagcacgtggatcatcatcgcgctctggccgtctttaaaggtggtgaactcctgcgcgcgcgccaccgggatagtggtgttgcgcgggatcactttctccaccaggccgcccatggtttcgaggcccagcgacagcgggatcacgtccagcagcagcatatcgctgtccggcttgttgcccaccaggatgtcggcctggatcgcggcgccgatggcgaccactttatccggatcgatcgacgtcagcggcgtgcggccgaagaaggcgcccacttgctcacgcaccaacggcacgcgggtggaaccgccgaccatcaccacttccagcacctcgtcggcggcgacgccggcgtctttcagcgcccggcggcaagccatcagcgtgcgtttcaccaacggagcgatcagcgcttcaaactgggcgcgggtcacctcgccctgccagccggccacctcgacgcgcacgctgtcggcatcgctcaacgcgattttggcggcgatggcggcatccagcagttgacgctgcacgccgtggtcgctgcgatcggccacgccggcctgctcgcgcagccagtcggccaacagatgatcgaagtcgtcgccgcccagcgcggaatcgccgccggtggccagcacttcgaacacgccgcggctgaggcgcagaatggagatatcaaaggtgccgccgcccagatcgtaaaccgcgatcaccccttcctggccggaatccagcccgtaggcgatcgccgccgcggtcggttcgttcaacaggcgcagaacgtgcaagccggccagacgcgctgcgtctttggtgccctggcgctgcgcgtcgtcgaagtaggcgggaacggtgatcaccacgccatccagctcgccttccagcgccgcttgcgcgcgcgcggacagggcccgcaggatatcagcggagacaccgaccgggttaaccgggccggcggcggtgacgatcagcggcaggccgttgtcgctggcctgaaattgatacggcaggttcgggtaacgttgctgcacatccgccaacgagcggcccatcatgcgtttgatggagctgacggtattggccggatcctgcgccgcctgttggcgcgcctcccagccgacgcgctgcgcgtccgcctgataatgcaccaccgaaggcagcaaatggcgcccctgttcgtcggccagcgtttccgcctgcccgctgcgcaccgtggcgaccaacgagttggtggtgcctaagtcgatgccggcggccaagcgtcgctggtgcggcgcggcgctgaggccaggctcactaatttgtaataaggccatgttgaagcttccacaatcagaatcagaaggtgttactcaaaacccagcagtttttcttcgagttgttcaacctgttgctggagtttgtccaaaaagcgcagcttgcgcacggtgtcggcggcgtccgcccactgctcactgtccaactgctgcagcatcagcgcgctgcgctgtttgatggagacggccagccgcgcgccgaaatcggccagcaggctttccgcctccggcttgcgctcaatggcgtcgagctcttcgcgcagttccagctgttccatcaggaacgcggtgtcgcgcatcgtatgctgttcgttgcccagatcgaagccgtgcaaagatagcatatactccgcgcgttttaacgggtgcttcagcgcctggtaggcttcgttgatggtcgccgcctgctgcaacgccatcaggcgttcgcgctccggctggttggcgaaacgatcggggtggaattggcgttgcagatcctggaagcgggacgcaagcaggctgccgtccacggtgtagcgaactggcagcccgaataaagtaaagtaatccatagcgtgctctgggcgttagcggatgaagttcccccgccgaaacgggggagcacgatggactgtcagacgttgaaactctcgccgcagccgcactcgcttgagacgttcgggttgttgaacttgaagccttcgttcaggccttccttaacgaaatcaagctcggtgccgtcaaggtagaccaggctcttgccgtcgatgatcaccttgatgcctttgtcttcaaacacgatgtcgtcatcgttggcttcgtcaacaaattccagcacgtacgccatcccggagcagccggaagttcgcactcccagacgcaggccgagacctttgccgcggttcgtcaaaaacgcctgaacacgctgcgcagcgctgtcgctcatggtaatagacatcacaacctcacacttcacatcaaagcccggcgcggccgggccgactcagacaaattacttggcgctatgcttgctcttatagtcggcaatcgctgctttgatggcgtcttcagccaggatcgagcagtgaattttgaccggcggcaattccagctcttcggcgatctgggtgtttttgatcgcttcagcctgatccagcgacttgcctttcatccattcggtcaccagcgagctggaggcgatggcggaaccgcagccgtaagttttaaagcgcgcgtcttcgatgatgccttcatcgttaaccttgatttgcagcttcatcacgtcgccgcaagccggcgcccctaccatgccactgccgacggtaggatcttcgttgtcgaaagaacccacgttgcgcgggttttcataatgatcgattactttttcgctgtaagccatgaccttgctcctgaaacctgagaattaatgatgcgcccattcgatgctgttgatgtccacgccctgcttgaacatctcccacagcggggacagatcgcgcagacggccgatggatttacgcaccagttgaatggtgtagtcgatctcttcttccgtggtgaaacgccccagggagaaacggatcgagctgtgcgccaattcatcgctcatgcccagcgcgcgcaacacgtaggacggctcgaggctggcggaggtacaggctgaaccggaagaaacggccaggtctttcagcgccatgatcagcgactcgccttcaacgtagttgaagctgacgttcaggatgttcggtgcgccgtgctccagatcgccgttcagatacacttcttccatatctttcacgccgttccacagacggtcacgcagagtgcgcagacgcgccatctcttcggtcatctcttctttggcgatgcgataagcttcgcccatgccgacgatctggtggacaggcagggtgccggaacgcatgccgcgctcgtgaccgccgccgtgtacctgcgcttcgatgcggatgcgcggcttgcggcgcacgtacagcgcgccgatgcctttcgggccatagattttgtggccggagaacgacatcaggtcgactttcagcttgctcagatcgataggcagtttgcccacgctctgggtggcgtcaacgtggtagatgataccgcgcgcgcggcacatttcgccgatcgcttcgatgtcctgcaccacgccgatttcgttgttgacgtgcatgatggagaccagaatggtgtcatcgcgcatcgcggcttcgagatcctgcaggctgatgatgccgttgctctgcggcgccaggtaggtcacttcaaacccttcgcgctccagctgacggcaggtgtcgagcacggctttgtgttcggttttgctggtgatgatgtgcttgccttttttctggtagaaattggcagcgcctttgatcgccaggttgtcggattcggtcgccccggaggtgaagacgatttcgcgcgggtcagcgcccaccagttcggcgatttggttacgggcgatgtctaccgcctcttccgcctgccaaccaaaacggtgggaacgggaagccgggttgccgaaagtgccgtccagggtcaaaaactgcatcatcttctcagcaacgcgcgggtcaaccggagtcgttgctgagtaatccagataaatcggtaatttcattgctcttgtgctccgtacatcacttccaaaaactaaaataatttcgccagctgcttatgcgcgcagattaacgttgatagtttcttgcggacggccgttggccgtgcggcgcgtatcgttgttttgacgatccgccaccaccagcacttcctggttgttgaccagttctgccagcgtaatattgttcaggaacccgctgatgcgctcgctcagatcgcgccacagggcgtgggtcaagcagcgatcgccgccctgacagccttctttgccctggcaacgggttgcatctaccgattcatcgacagcagtgatgacagcgccaacggcgatctcacccgcgtctttacccagcagataaccaccgcccggaccgcgcacgctggccaccaggccattcttgcgcagacgggagaataattgttccagataagagagcgaaataccctggcgttcggaaatgtccgccagtggcaccggcccttcctgagaatgcagcgctacgtcgagcatagcggttacggcataacggcctttggatgtcagtctcatagctcaatggttacctgttggtcaaatatggccgaaagtctgacattcccgagtaaaacagtcaactatttaacccagtaattaactcaagtattagcacgttttgaacttagcaagaacaaaggtatataaaatacatgttataacctttggataactaatactattgtcgcccaccgtgatgccacatcaattaattaccttgatgtttatcctgtttctcgatcgacgtcagcatgccgcgcaggatattcagctcctgcccttccgggcgcgcgcgggtgaacagccgacgcagacggttcatcacctggcccggatgcgacgggcgaatgaaaccggtgcgctgcagcgtctgctccagatgctgatagaaacgctcgaggtcgtccaccagcggatacggtgtctcttccagctgcggcgcgcctgcctgttggcgatcgaggtaagccacgcgcacttcgtacgccaggatctgcaccgccatcgccaggttcagcgagctgtagtccgggttggccggaatggcgacgtggtagtggcacttttgcaattcatcgttggtcagcccgacgcgttcgcggccgaacaccagcgccaccggcgcgtgctcgccttcgtgcaccgcgcgcacgccgcattcgcgcggctccagcatcggccacggcaaggtgcgagaacgtgcgctggtacccaccaccaggctgcagccggcgatggcgtcatcgagggtatcgacgatagtggcgttgccgatcacgtcgctggcgccggcggccagggcgatggcctgagaatcgggtttgatcagcggattaaccagataaaggttggttaaacccatggttttcatggctctggcggtcgagcccatgttgccggtatgtgaagtctctaccagaacaatgcggatattgtgcagcatacaaactctgagcgtggcggaaaatcgcagcatcttaacacagccgtaggcaatttgccgaacagctgctatacttcgcgccgtttcctgttctttaacatcctagttggaagatacccatgcatccgatgctgactatcgccgtgcgcgctgcgcgcaaggccggtaacctgattgccaaaaactacgaaaccccggacgctgtagaagcgagccagaaagggaccaatgacttcgtcaccaacgtcgatcgcgatgcagagcatctgatcatcgacgtcatccgcaagtcttatccgcaacacagtatcgtgagcgaagaacgcggtgagctgatcggcgaagatcgcgatgtgcaatgggtgatcgatccactggatggcactgcaaacttcatcaaacgcttccctcatttctccgtttccatcgccgtacgcatcaaaggccgtactgaagtggccgtggtttacgatccaatgcgcaacgaactgttcaccgccacgcgcggccagggcgcacagctcaacggttaccgtctgcgcggcaccaacgccaaagatctggatggcaccatcctggcgaccggcttcccgttcaaagtcaaacagcacgccacgccttacatcaacatcgtcggcaaactgttcacccagtgcgcggacttccgccgcaccggttccgctgcgctggatctggcctatgtcgccgccggccgcgtggacggtttcttcgaaatcggcctgaagccgtgggacttcgccgcaggcgaactgctggtacgtgaagccggcggcctggtcaccgacttcgtcggcggccacaaccacttcagctccggcaacgtggtcgcaggcaacccgcgcgtggtgaaagccatgctggccaccatgcgtgaagaactgagcgaagcgctgaagcgttaatcgccagaagcgaatcgaaaaaaagcgctgccgatgcagcgctttttttatgcccgttagcgggagaaggggcggataccgccgccgaattccggctgcgcgctgacgtacagcaacagcccggcggccaacaggatcagccccccggccagcgccaacgccccccaggctaccgcgctccaggcggcgggcgcgcgcgaacggctgaggcgcaccgccagccggcggctgtaatgcaccagcagcgccagcatggagatggtcaacgaggtgccgaacgccatcgccagcgcggaaagcacgccccagccgaacacgccgatcaccttggagaacagcagcaccaaaatcgcccccgagcaggggcgcatgcccatcgccagcacgatggcggttcgggtgcgccagtcgctccccgcctgcagctcgctgtcgctcggcagatgccggtggccgcagccgcagtcggcgctgtgcacatgatcagccgccagcggcgtcaggctgttgatgcgcagcgccggcgccgggcgcatcgctttgatcgccgcaaacagacgtttcagcgcgcgccagctcagcagcacgccaagcagcatcaccagaataaaactgcccttctccagccaaaagctgctttggtgcagctggcgcgaagagagctgcaacaccaccagcatcaacgtcaccagcgcgatcgccaccagcccctgcaccagcgaagcggcgaaggtcagcttcaggctgcttttcagccgcgccgggtgggtggccagataggtggcgatcaccactttaccgtggccgggcccaagcgcatgcaaaacgccataaccgaggctgaacagcatcagcgccagcccggcctgctgcggcgcggccttcacctgctgcaacagccccgccatctgttgatgcagcgctttttgccataccacgctctgcatcagcagctgcggccagtagtgccacgccagcaacgcggcggccatcagcgccagcgtgaacggcagcagcggccacaggccaaaggcccaatggcgtcggcttatcgtcggcggcgagaaatttagcgacattgcagcgtcacccgctgggcaaactgttgccccagcgccaggtcttcgccgggcgagtcgttcttgtcgagcgacagcgcataggcctgcagcgacgcattcggcttcggcgtgatcagcttgtagctgcactgctgcgccatctccggcggcaaatgcagcgcattttggtctttataggtcatatccacgaaataagtcggatcgtaagtagaaagctcgaacggcttgcccgccagcggctgcggctcggccaacggcagcacgaactccagcaccgcctggttgccctggcgcgacaggtgatattcgctgggcaagttcaggtatttcaccggcttgccgtcgcggtaaagatcggtgaaatagtgctgccccagcacgttggccatcacttccgccgccagctttttccacacttccgaatcgctcttggcgtttttcgcatcgtagagcagatccgccgaggtgatttcatccatcacccacaccattttcaggccgaccagccgctggtccttggcgacgaaggtggtgttcatgtcgataaagctgtgcggatgagcggccgctccagcgctgaacacggcgccgagggcagccaaaagacgacgtaacttcatcattatcctgtcttacctgcatttgttataacgtaacacaaataactgccgaacggcccgcctctcccggcgatatttgtgacgaaagttgtaagccgaagtaaaagccgcgctgtcatcctgacgttacaaagccttttgctatgcttaggcataatcgcaaccttttatgccggaaggtgacaatgagcctggacacctctcccgtgcccgagctctccggacaacaacggcgctgtcatctgctgctgatgctgtacacgccggagcccgagttacagctggagaccttaagccgaatcaatggcgtcgcccccccgataacccggcaagatatagccgaggtggccagtgaaatccagcgtttccatcacctggagatcgccgtcgatcccgaccatggctaccaacttcggggcagcgcgctcgaccaacgcctgtgcctgatccattggctgcggcgggccctgcgctgcagcccgcagttcgtcgaaagcgacttcgccccgcgcctgcggctggcgctggcggccgatgccgggtcggcgtcgcagctggctcaagcgatagacgcctgcgagccgctgctcaaccgccacttcgacgcgcgcgaccgccaattcctgcagcattatctgctctactgcgcctggcaaaatcgcctgcagcagcatccgcgtttcgacgccgttcagcgcgactggctgcggcaaaagccggaacagcaagccgccgcctggctgcatcaggcctgcaaccggctgtttaaccagccgccgcaggctgacgagcgcgattttttggcgctgaccttcaccctgttgaaaaatcacagctaccacagcaatgactcggcgcaagagcagcggttgatggcggcgatcggcagcatggtcgagcgtttccagcaactttccggtatggccttcagcagcaaggccgagctggtcagccagctgttcgctcacctggcgccggcgctggagcgctgccgtttcgccatcggcatcgacaatatgctgctggaagacgtggtgcgcaaatacccgcggctgatgcgcaccacgcaggaagcgctgaaaccgctggagcaggagtacggcgtgcatttttccaacgaggaggcgggcctggtggccatcagcttcggcgcctggctgatgcaggacaacgcgctgcaggaaaaacaggtgctgctgctgacgctggacaatccgcagctggaagaggaagtggaatatcagatccgcgagctcacgctgctgccgctgaacatcaagtatctgccgctgagcgactatctgcgcggcggcgcgccgcagggcgtcacgctggtgatcaccccttatgcggcggtgcacaacgatccgcccccgccgctgatctataccgaactgccgctggaaacccggcagcgccaggccattcgcgcgctgctggaagcgccttaatcaacggctgacgctgaccgccggcggccggatgaacaaagccggcgccgcgaccgccgccatcacccagaataccccgccctgccaatgttcgaacaggaacccggcaatcaccgtcatgacggcgataccgccgcccatcgccaacgccgaatacaccgcctgcagccagatcacctcttgcccctgacgcgcggcgataaagcgcatcgccgccagatggcagacggtgaaggtgccgcagtgcaggatctggatcagcagcagccaacccagctcggtgctgtaggccatcaggctccagcgcaacacgccgcagcaggcggagagcagcagcaggttgcgcgcattccagcggcggaacagcacgttgctgctggcgaaaataatcacctccgccaccacgcccagcgaccacagataaccgatggtcgaggccgaatagcccgcctcctgccagtaaatggagccgaagctgtagtaaccggcgtgcgccccctgcagcagcgtgacgcacagcaggaagcgccacaccggcccctctttcaacagcgcccacagcgaacgctcggctccgccgtgcgtgcgcgcttcgccctgcggcatcacgctcggcttcagcaacatgcccagcagcatcgccagcacgctgaagatcaggctgtagagaatggcgttatggccccacaccgccaccagctgcccggtcagcgccgagccgatgacgaacgccagcgagccccacagccgcacccggccgtagtccatgcggatttgcttttgccaggtggcggccagcgcgtcggtcaatggcaccagcggcgagaagaacaggttgaaccccgctatcaccagcatcagccagccccagccgttgccgaagcagaagccaaccgcgaaagccagggtcagcagcgccagcaagcgcaaggcggagaccagatgagagggatctttaacgcgcggagcaatcagtaaactgccgaggaagcgggccaccaaaccggcgcctagcaacatgccgatggtttcgggcgcgatgccctcgcctttcagccacacgccccagaacggtaagaagatgccgtaggaaaagaagtaggtgaaataactgagcgcgagccaacgcgtggattgcagaaccatgatccctccggtgtgagggcaatactttgacagagctcacaccggcccgcaatcttcattccacttcaatgcgttagagtgccagacagctcacagtttgccgcaagcggccataaaaaaacccgccgcagcgggttttgtcaggcgaaagcgggattaggcgtaaaccggcaggcgggcgcagatatccagcactttcttcttggtgcgttcgatggtggcttcatcgttgatgttgtccagcacatcacagatccaaccggccagttcgcgcacgtcggcttctttgaagccgcgacgggtcacggccggggtgccgatacgcacgccggaggtaacgaacgggctcttcggatcgttcggcacgctgtttttgttgacggtgatgttggcgcggcccagggcggcgtcagcttctttaccggtcaggttcttgtcgaccagatccagcaggaacaggtggttatgggtgccgccggagaccactttatagccgcgctgcaggaacacttccaccatcgccttggcgttgaccgccacttgctgctggtaaaccttgaactcaggctccatcgcttctttcagcgccaccgccttgccggcgatcacgtgcatcagcgggccgccctggccgccagggaacacggcggagttcagcttcttgtacagctcttcgtcgccgcccttcgccaggatcaggccgccgcgcgggcccgccagggttttgtgggtggtagtggtgacgatgtgcgcgtgcggcaccgggttcgggtacacgccggcggcgatcaggccggccacgtgcgccatgtcgacgaacagataagcgccgatgctgtcggcgatttcgcgcattttggcccagtcaaccacgccggagtaggcggagaagccgccgatgatcattttcggcttgtgggtttgcgcctgtttggccagatcgtcatagtcgatttgacctttgtcgtcgatgccgtaaggcaccacgttatacagtttgccggacaggttaaccggggaaccgtgggtcaggtggccgccgtgcgccaggttcatgcccagaatggtgtcgcccggctgcagcagcgcggtgtacacggcgaagttagcctgggagccggagtgcggctgcacgttggcgtaatcggcgccgaacaattctttggcgcggtcgatagccagctgctcaacgatatccacgtattcgcagccgccgtagtaacgcttgcccggatagccttcagcgtatttgttggtcagctgggaaccctgagcctgcattacgcgcgggctggtgtagttctcagacgcgatcagctcgatgtgctcttcctgacgcaccacttcctgctccatggcacgccacagttccgcatcgtaatcggcaatgttcatttcacgctttaacatccggcatctcctgacttaaatcagctaactaaaaaatcaccaaataactacccgtttggggtctgggccacagtgtaaaccgtttcgccctaccgaagataggtcttgacagaggtttttacgcaaacgattggcataaggcggcgcaaggctttgatccgcgaaacgctgccgtttatcaacggacatttcctcatgcgaacaatgcgcttttttcatgttctgtgagcccgatcgacgcccgaagaacaccgcaacgaaaacaagggtatttacaagcggcgcggaacccaataagatgcatttaaaatgcatcattaaaattctcgtcaagatcccaacccaaggagcgctcccatgctggatagccaaaccatcgccaccgtgaaatccaccatccccctgctggcagcaaccgggccgaagctgaccgcccacttttacgatcgcatgttcgcccacaacccggaattgaaagacattttcaatatgagcaatcagcgcaacggcgatcagcgtcaggcgctgttcgacgccatctgcgcctatgccgccaacatcgagaacctggcggcgctgctgccggcggtggaacgcatcgcgcagaagcacaccagcttcaatattcagccggagcagtaccaaatcgtcggcgggcacctgctggcgacgctggacgaaatgttcagcccgggtcaggaagtgttggacgcctggggcaaagcctacggcgtgctggccaacgtgtttattcagcgtgaagagcagatttatcagcagagcgaaaccgacaacggcggctggcgcgatctgcgcgcattccgcattctgaagaagcagccgcagagcgacgtgatctgcagcttcgtgctggcgccggtggacggcggccgggtggcggacttcaaaccggggcaatacctggcggtctacatcaagcacgacagcctggaacatcaggaaattcgccagtactcgctgaccacctcgccgaacggcgagttctaccgcatcgcggtgaagcgtgaagatcagggtaaagtgtccaactacctgcaccagcaggcgcaggaaggcgacgtgatcgacatcgccccgccgcacggcgacttcttcctcgacgtgacgccgaccacgccggtggcgctgatctccgccggcgtcggccaaaccccaatgctcggcatgctcaacagcctgcacgacagccaacatcaggcgcaggtccactggctgcacgcggcggaaaacggcagcgtgcacgcctttgccgaggaagtggcggatattgccgggcgcatgccgaatctgagccgccatgtgtggtaccgcgagccgggcgccgatgacgtggaaggccgcgactaccacagccgcggattgatggatttgagcgcgctgcaaggcagcctggccgatccgcaaatgcactattacttctgcggcccggtggccttcatgcagttcgtgggcaaacagctgttggagatgggcgtagaggccgaacgcatccactacgaatgcttcggcccgcataaggtgctgtaatgcgtgcggagcgcggccgtcagaccgcgctcccccttcatttctcctgcagttggcgcgcgtcctgcacctgctgcaccgtcaccggcgccgcctggttgccccagcttccccgcagatagctcatcagatcggccgcttgacgatcgttcaacgcccagccataagccggcatgtcgaacgccatcgcctgctgcgtgatcggcgtatgcgccccttccagcaccacccgcagcgcggtcagcggattatccgccgttaccgtggcattgcctgccagcgccggaatggcgaagtcggtgccctcccccttattgccgtggcaggtcgagcagtacatcgcataggtcgccttgccgcccgaattatccgcctgcgcagcagatgaagcaggtttggcggcggtgtccggcgccaggctgcgcaggtacaccgcgatggcgttcagatcgccgtcgctgaggtactgcgtgctgtgggtcaccacctcgctcattggcccggcgaccgccgcatggcggctgcggccggttttcagcagcgccgtcacctcttccggcggcaggccgcgcagattggaggcgtaccagccgtccagctcggcgccgctcaggaacaccggctccttaccgtccaggcccttctcctgcatcgcccagccgcgcggcgtgtggcagctgccgcaatggcctgcgccttgcaccagataggcgccgcggttccactcggcgctttgctgcggatctgcctgatacggctgggcgtcgtgggacagcgagttccacaccgccagcggccagcgcatcgacagcggccaagtgatgtcgctgtcgcggttggcgacgttctgcgccggcacctcgttcatcagatagtcatacagcgcgcgcatgtcttccgcgctcattttggcgtacgaggtgtacggcatcgccggataaagccggtgaccgtctttggcgatcccctgacgcatggcgcgatcgaactcttcgaatgagtaagcgccgatgccgtgcagcttgtccggcgtgatgttggtggcgtagatagccccgagcggcgtcgggaacttcatgccgcccgccaattcggcgccgcccggcgcggtatggcaggcggtgcagtcaccggctttggcgacgtattccccggccgacatcgcctgggccgagccgccggcggccagcaggctcaacaggctcaacaggtacagtgaacgcagactcatgctccctccttggcggcaaccttgccgtaggccagttcgttaaccgcgcgccacgcctgatcgatcgccgagttggcgtacgggctccagtcggcatcggagttggcgatagcgatcttgccgatcggctgccgcgccgtttcgatgattttcttggcttcgtcttcgtcgtcaaacagcccgttgaggaagtaggagtaaccgtgcgaccagcggttgacggtgatcgcctgaatgtcgcgctgatgatcgaaaccggcctcgcccagcatgccctgcagctgttcgcggatcatctgttcgtgcacttcgaacggcgtgcccagcagcagcgcgcgccctttacgcgactgttcgcgcgtgctgaggccgctgcccggcagcgtcggcacatacaccatatgcaggccgatcggccgatccggatcgcgcgggtgctgatagccgcccatgctcaccggatagtccagcttcacgcggctgtacggcgcggccggcgaataaacctcgtgcacgcccagcttgatgaacggctgccagttgcggatcaccaccttgctgtacaccagcggcgccttgacgttctgcttcagcgcctcctgctgctcgtgcgccatctccggcaccagatacgggatcatcatgttgtagccggccatcaccacctgcccggcgcgcactttggtcatcttctcgccggtcatgtaggtgacttccaccttgtcgccgacgttggccgcgtgcagcccggtgctgttcaaacgcagcttcaccggcgactccggccgatcgagctggctgtagtcgaatttagccagcaccacatcgttcatgtccttgccggccggcgccaccgccgggatcagctggcgcaccatcaggcgcgccagcgtggcgttgccgtccgggaagtggaacacgtaaggatcgtcgagatccgcctgcgactcttcgtccagcggcggcagattcatgccgtcaaggcccggcagatcgcagatgcgcgcatcactgcacgaggtgccgtcgatgcccaccgcctggaagtcgttggtggtctgctggaaatagcggatcgccagttcgctcaggcccaccttctcgcgcaggaactgggtatagctgtgggtatcgagccattcgaccttctgctccagcgtcatctccggcagataatccttctccaccgtgtgcagcgcgatcagcgcctggcgatcgctttccggcagcgggaaatcgccgatgaacgcttcataagagcggccgttgaggcgatcgcgcggaatgtcgtccgccaccgtgcgccccggatcgccgctcaccaccttgtcgacgccgaagtttttgcgatcgaagtaaacgccgcggctcaaattcaaatccgggtagaaggtggtgtcgaaagcctgttccagttggtcgatatcgacgccgagcttgcgcagcagccccatcgccaccgggctgaagttggaacgcggcgactgcaacgattcgctgccgccgtagccgagcagcatgccgtcgtcgctgttgaactcgttgcgcttggcatggccgccgaagtcgtcgtggttgtcgatcaaaagaatgcgctgctgctcgcccttcagctgctgccagaaacaggcggccgccagcccgctgatgccggcgcccaccaccaccagatcgaactcttcaacggcgggcacgctgccgaaatcaaaggttttgccgtcgcgccccagctggtgcgcatgctcgaacgagcccggatggttaccccgcagcccggtcagcgccggcgggtagtacagggtttgattggcggtttgcggcgacgcgcgcaagatttgcagcggcgtcaacccggcggcgatggtgatcgccaccccgttgagaaaatcgcgtctggtgatacccatataggcttcctttcaatttttattatcatcggccggccggggccggcccaaaggccgcgctattgtgcggataattattgtaaaatcaatgtttgaacatcacatgacgaatggccgtgtaatcctccagcccgtacatcgacatatccttgccgtagccggacagtttctggccgccgtgcggcatctcgctcaccagcatgaagtgggtgttcacccaggtacagccgtattgcaggcgggcgcttaagcgatgtgcgcggcccacgtcgcgggtccatacggacgacgccagcccgtagttggattcgttcgcccaggccagcacctgctcttcgtcgtcgaacggcgtcaccgtcaccaccgggccgaacacttcgcgctgcacgatctcgtcttcctggcgcgcgccggccagcagcgtcggctggaaatagtagcccggccccttcaccttctcgccgccggtgaccacctgcacatgcggcaacgctttggctcgctcgacaaaaccggccacccgctccagatgctgggcggtaatcaacggccccagctcggtgctctcgtcgtccggcgcgccgatcttcaggctggccaccgcctcgcccagccgcttcaccagctcgggataaatgcttttctgcgcgtagatgcggcaggcggctgtgcaatcctggccggcgttgtagaacccaaaaccgcgaatgccgtccaccacctgctgcagatcggcgtcgtcgaacaccagcaccggcgccttgccgcccagctccatatgggtgcgtttaatgccggcggcggtgtgggcgatgatgtgctcgccggtggcgatcgacccggtcagcgacaccatgcgcaccttatcatgcccggtcagccgatcgccgacgctggcgccgcgcccgaacagcacgttgagcacgcccggcgggaacagcccggcggccagttcggccagtttgaaggtggtcagcggcgtctgctccgaaggcttgatcaccacgcagttgcccgccgccagcgccggcgccagtttccaggccgccatcatcagcgggtagttccacggcgcgatcgaggccaccacgccgagcggatcgcggcggatcatcgaggtgtgcccggccagatactcaccggccgccatgccggtcaggcagcggctggcgccggcgaagaagcgaaacacgtcggccaccgccggcagctcgtcgttcagcacgcagtgataaggcttgccgcagttgagcgactccagcctggcgaaggtctcggcatgctcgtcgatcagatccgccagcttgagcagatgctcggcgcgctccttcggcgtggtttgcccccaggcggcgaacgcggcgtccgccgccagcaccgcgcgatcgacctgctccgggctggcctccgccacctgcgcgatcacttcgccggtcgccgggttatacaccggctgggtcgcgccctggccattcaccagttggccgtcaatcaacagttggctttgcatagggttatccttttgtcagaggtcgggtaaggaaattattttccgctgccggcgacgctttccccacctttggtcaggtagtaagcgccgaggatcggcagcatggtcaacagcatcaccgacagcgccaccacgttggtgatcggcacgtcgcgcgggcgaccgagctggttcagcagccacagcggcagcgtgcgctcgtggccggcggtaaaggtggtcacgatgatttcatcaaacgacagcgcaaacgccagcatgccgccggccagcagcgccgagccgaggttcggcaagatcacgtaacggaaggtttgccagccgtcggcgccaagatccatcgacgcttcgatcaggctgtacgaggtgcggcggaatcgggcgatgacgttgttgaacacgatcaccacgcagaacgtcgcatggccgacgacgatggtcaggatgcccggctcgatgttcagcgccttgaacgccgccagcagcgccaggccggtgacgatccccggcagcgcgatcggcagcagcagcaacagcgaaatgctgtctttgccgaagaaatcgcgccgatacagcgccgccgccgccagggtgccgagcaccagcgcgatggcggtcgccaggcaggcgatctgcgccgacagcagcaccgcatcgaggatgtcctgccgcccggcggcaacgttgaaccagtgcagcgtaaagcccttcggcgggaagctgaaggccgcgtcctcggtgttgaaggcatagatggcgatgatcgccaacgggaaatgcaggaagacaagtccgccccaggcggccagcttcagccctaagggcgcgcgttcagagtgcatcgaaagcccccagacgtttgacgatggaaaggtagatggcgatcaggacgatcggcaccagcgtaaaggccgcggccatcggcatattgccgatcgcgccctgctgggcgtagaccatgctgccgatgaaatagcccggcggccccaccagctgcggcacgataaagtcgcccagcgtcagcgaaaaggtgaagatcgatccggcggcgatgcccggcaccgccagcggcaaaatgacgtggcggaaggtctgcgccggccgggcgcccagatccgccgaagcgtgcagcagcgagggcggcaggcgctccagcgccgcctggatcggcaggatcatgaacggcagccagatataaacgaacaccagaaaacgccccagccccgaggtcgacagcgtgttgccgccgatgccgggcaccgtcagcagcgaagccaacagcggctccagccccaggtgctgcagaaaccactgcgccacgccgtctttcgccagcagcagggtccaggcataggctttgacgatatagctggcccacatcggcatcatcaccgcgatgtaaaagaacgccttgacgcggccgctggtataacgcgccatgtaataggcgatcgggaacgccagtaccgcgctggccagcgacaccagcaccgccatggtcaacgtgcgcaggatgatgtcgtagttggccgggttgaacagcgccgccaggttggcgaaggtcagatccggcgtcaccgccatggtgaaatcgtcgaaggtgtagaacccctgccacagcagcgtcagcagcgagccgaggtacaccgcgccgaaccacagcagcggcggcaccagcagtaacagcagatacagcgtcggccggcgatagagccaggtcgacagcgcgcgcacgctaccgccgcgcgccgggggggaatcgatgctcatgtccatctcacctctcctccagcagcggcaccatcgccgcgcgcggccagcaggcgacgatcggctggccgatctgacgctgttgcccttcggcgatccactgtggattggcctggctgaccagcagcttttcgccgccgttcagcgcgatctcatagcgcgtggccgcgccctggtagtggatttcctgcagcgtgccctgcacctggatttcgtcctgcgccgcgccgccttgctccagcaggcgaatatgctccggccggatcgagaaggttcggctttcgccgagcagacgctgcgccagctcgctgcgcaccacgttggaggtgccgacaaactcggcgacgaacggcgtcttcggccgcatgtaaagctcgcgcggcgtatccacctgctcgatgcggccgttattgaataccgccacccgatcggacatcgacagcgcttcgctttgatcgtgggtgacgaagataaaggtgatgcccagctggcgctgcagcttcttcagttcgccctgcatctgctcgcgcagcttgagatccagcgcgccgagcggttcgtccagcagcagcacccgtggccggttgaccagcgcgcgcgccagcgccacgcgctgccgctggccgcccgacaggtgcgccggcttgcgttcggcgacgaaaccgagcgccacgctctccagcgcctcttgcgcccgcgccagccgctcgcgtttggcgacgcccttcaccatcaggccgtaggcgacgttttccagcaccgacatgtgcggaaacagcgcgtaatcctgaaacacggtattcacgtcgcgctgatacggcggcaggttggcggcttcctggccgtgaatgcgaatcgagccggaagtgagctgttcaaagccggcgatcaggcgcaggcaggtggttttgcccgagccggacggcccgagcatggagaagaattccccgtcctgaatgtcgatggatacccgatccacggcgcgaacatcgccgaaagtccgcgaaacatcgatgaattgcacggcaatggtcattttctgtgctccattctgatgtgattcgggcgcagcgggctgcgccccgcggcttagcggccgcccatgatggcgatgtaatcctgggtccagcggctgtacggcacgaacttgccgccctgcgcctgcggcgttttccagaaggcgattttgtcgaactggttgaaaccgttggtttcgcaacccttctcacccagcagcgcgctggccttgcagcccgccggcgaagccggcaccgacccgaaccaggccgccacgtcgccctgcaccttcggctccagcgaccagttcatccactggtaggcgcagctcgggtgtttggcatcggcatgcagcatggtggtgtccgcccagccggtcacgccctctttcgggaacacggtggcgatcggctgtccttcgcccttcagggcgttggcctgatacggccaggcgctggaggccaccacgccttcgtttttaaagtcgctcatctgcaccgaggtatcgtgccagtagcggtggatcagcgcgtgctggctgcgcagcagcttcagcgccgcctgatactgctcttcgttgagctggtaaggatcgctgatgccgagctgcggctgggtggccttcaggaacagcgccgcgtcggcgatgtagatcgggccgtcgtaagcctgcacccgcccctggttgctcttaccgtccggcaggttctgctgctggaagatcaccgcccagctgtccggcggcgtcgggaaggttttggtgttgtacatcagcaggttcggtccccactggtacggcgtgccgtaagttttgccgtccacggtataccaggcgccgttcagcaggcgcggatcgatgttcttccagttcgggatcagcgcggtgttgatcggctgcacccgcttgccgaagatcaggcgtagcgaggcgtcgccggaggcggtcaccagatcgtagccgcccttggccatcaggctgaccatttcatcggaggtggcggcggtcttcacgttcaccgcacagccggtttgcttttcaaactgggtgacccagtcgtagtttttgtcggactggccgcgttcgatgtagccgggccaggcgatgatgtccagccggccttcgcctttgcccagcgcctgcggcagatcggccgcctgggccaggccgcacagcacggtgagacagagcgcggagacggtggtggtgactgcggtagtttttcccatcgtaattacccctgtgttgcttatcggtatgcggcagggaacggctgccgcctgatttttcttgatataaccgttagaagctggctttgaacttcgccattacgtgcctgacaacgctgtaatcctgcagcgaatcgctggacagatccttgccgtagccggagcgtttcaggccgccgtgcggcatttcgctcgccaaggtgaaatgagtgttgatccaggtgctgccgtactgcagatgggcggcaatgtgcagcgcccgatcgatattttgcgtccacaccgacgaggccagcccgtattccgagtcgttggcccaggcgaccgcctgctccaggtgttcgaagcgcgtgacgctgaccaccgggccaaacacctcacgctgcacgatctcgtcgctttgcaggcaacccgccagcaaggtcggctggtagtagaaccccggcccggagtgcgccgcggcaccggtgatcaattcgatatgcggttggctgagcgcccgctcgacaaaactggcgacgcgatcgcgctggcgggcacttatcaacgggccgatctcgttgtcctgatcgcgcttgcgggcgaagcgcaggctggcgaccgcttcgcccagcgcgtccaccagtttgggatagatgccggcctgcgcgtagatgcggcaggcggcggtgcagtcctggccggcgttgtaatagccataggtgcgaatgccgttgaccacctcgtcgagatcggcgtcgtcgcaaacgatcaccggcgccttgccccccagctccagatgggtgcgcttgacgcttttggccgccgcctggaggattttttgcccggtgacgatatcgccggtgaccgacaccagccgcacctgcgggtgccccaccagctggctgccgaccccttcaccgccgccgtagacgatgttcagcacgcccggcggcaggatctcctgcagcgccggcaccaacgccagaatggtcagcggcgtatgttcggagggtttaaacaccacggtattgcccgccgccaacgccggcgcgatcttccacgccgccatcatcagcggatagttccagggggcgatcgaggccaccacgccaatgggatcgcggcggatcatcgaggtgtggcccggcacatactcaccggccagttgcccttgctgcgtgcgcaccgcgccggcaaagaagcggaacacgtcgaccgccgccggcagatcgtcattgagcgcctgatgcaacggtttgccgcagttgagggcctccagctgcgccagctgcggcgcctgccgctcaatggcgtcggcgatacgcagcaataaggcggcgcgctggcctggcgtggtacgcgaccagtggccaaacgcctgctgcgcggctttcaccgcgctgccgacctgcgccgaagaggcttcggtaagggcgatcagcgtctcgccgttagccggattgacgatgcactcctgctggccttcgccgtcgataagctgaccgttaatgaactgctgacaggacaaacctgagagaacctgcacatccgccatcgcctgacgcccctaagtgacaaaaacgttaaccaaatgtgaataagttagttttaatcagcctaagcgagcctctggcgggcaacaaattctaaatactgaacgacgcgttcgattaaatcgaatgcttaagcccggcggcatgtttgctgccgttctcgcgcgcgatggtgaggaacggcgtcaccagctccggccgcgcgctgccgcgccgccatgccaacccgatatccagcggctccagcagatcgtccagcttgcgcgcctcgatcatgttgccctccagcgaccaggcgcggtacgccatatccggctggatggagactcccatccccgccgccaccaggctgcgcaccgcctcggtcgaggcggtcttcatggcgatctccggcttcagcccggcgcgcgcccagatgcgccgcgcgtgcacgtccatttcatcggcgttgagctggatcagcggctgtttggccacgtccgccaggctgatgctctcgtgctccagcagcgggtgcagcggcggcagccacaggcgatacggcgagtgcatcagcacctcggtctgcagcgcgtcgcggtcctcgatgttcgacaagatcagcacgccgatgtcgatctcgccgctgaccagcagatgctcgatgtacgggcgttcgtcttcaaccacctgcacggtgacattgggataagccgatttaaagcgcgtgagcagttccaccaggaagtaaccggccaccaggctggtgacgccgatagtcagcttgccggtcaggctttcggtgccgatctgcaggctgcgcttggcgttgtccaccgtcgccaggatcagatacgactggcgcaagaattggtgcccctgatgggtcagcgtcatgcccttggcgtggcgatcgaacagccgcacgccgatctcggtttccagctgctggatcgccagcgtcagcgaagactgggagacaaacaccgcctgggcgccggcggagatcgacccggtttccgccacggcgatgaagtggcggatttggcgtaacgtcatcatgggggtgattcctcaagcaaaaacattgcgttgagtgtagacgccggccgtgaagcgatcgggaaaagtgtcaaaaacgcgatagcgttcgcttttttagaatgcccgcaggcaaaaatgggggaaacggcgaggcgaagaagtgtgatgtacggggagcagaaatgacaagggcgcagcatgctgcgccctcctgatggccgatgaacctgcggaggatcagatcgcttcttcgtcctgctcgccggtacggatacgcaccacacgcgccacgtcgaagacgaagattttgccgtcgccgatcttgccggtctgcgcggtttgcataatggtttccacgcaggtgtcgacgatgtcgtcggcaaccacgatctcgatcttcaccttaggcagaaaatcgaccatgtattcggcgccgcggtacagctcggtgtggcccttctggcggccgaagcctttgacttcggtgaccgtcatgccggtgatgcccacttcggccagcgcttcgcggacgtcatccagtttgaacggcttgataatcgcgtcgatctttttcatcttctttccttttaccaatttttgcggccaaaaccggatgtgatggggtagcggcggtctttgccgaagttacgggcggtgatacgcggcccgacggcggcctgacgccgcttgtattcgttgatgtccaccaggcggatcaccttgcgcacgatcgcttcgtcgaacccttcggccaccagatcggcgaccgacttgtcgcgctcgacgtagccttccaggatcgcatccaggatatcgtacggcggcaggctgtcctgatcgacctgatccggcgccagctcggcggacggcggacgatcgatcacccgctgcgggatcacgtaggagacggtgttacggtattcagacaacttgaacaccagcgttttcggcacgtccttcagcacgtcgaaaccgccggccatatcgccgtacagcgtggcgtaaccgaccgccatttcgctcttgttgccggtggtcagcacgatgctgcggcgcttgttggacagcgccatcagcaccaccccgcggcaacgcgcctgcaggttctcttcggtggtgtcgcgctcggtgccggcgaacatcggcgacagctggcccataaaggcgtcgaacatcggttcgatggagacgatatcgaactccacgccgaggatttccgcctcttccttggcgtcggcgatgctgatatccgcggtgtagcggaatggcatcatcagcgcctgcaccttgtctttgcccaacgcatccacggcgatcgccagcgtcagcgccgagtcgatgccgccggacagccccagcaccgcgcctttaaagccgtttttggtcacgtagtcgcgcaccgccagcaccagcgcctgatacacctgcgccagctgcggcagctcagcggccggatcggccatcggcaccacatccagctcgttgaattccaggcgggtcacctgctcgtcgaaggccgccagacggtgggtcatggtgccggcggcgtcgaagaccttggagcagccgtcgaagatcagctcatcctggccgccgacctggttgaggtacaccagcggcagctgggtgcgctggcagtggccggccatcagcgttttgcggatatacggtttttcgcgattatacggcgaggcgttgatcgacaggataatctccgcgccggccgccttggcggcgtcgatcggctcagggaaccacagatcttcgcagatcagcagccccagacggtagcctttcagctccaccacgcaggtgtcgttgccggcgtggaaatagcgcttctcatcgaacacgccgtagttcggcagctgctgcttgaagtagcgggtcagcaggcggccttcggcgaacagcgacagcgcgttgtacagcttgtcgccttcgcgccacgggtggccgaccaggatcgccgtctcggcggaggcctgctgcaggcgcagcagctgcgcatcgcagcgctcatagaaatcattgcgatacagcagatcttccggcgggtagccggacagcgccagttcgctgaacatgaccagatcggctcccgccttctgctgctcctgcacgatttgcaacatgcgttcggtgttgccttcaatgtcgccgaccagcaggttcaactgggccagggcgatggaaagtgatctgctcatttgtgtacgatcccgcttaatacgttccatggtgctctacgccggggcacgccgcggcaaagagaacggagtgtaaatcattccgccggatttgttgagaacctgcgtggcaggcgccggcgggaaactgtcattctttaaaatcgttggcgtccagctcgtggcgcgacagcaatttgtaaaactcggtgcggttgcggcccgccatgcgcgcggcctgggtcacgttgcccttggtgatctgcagcagcttgcgcaggtaatgcaactcgaactggttacgcgcttcggcaaaggtcggcagcgcggtattttccccttccagcgcctgctccaccaacgcttcgctgatcaccggcgccgaggtcagcgccacgcactgctcgatgacgttgaccagctgacgcacgttgcccggccagctggcggtcatcagccgcttcatggcgtcggtcgagaagctgcgcacgaacggcttgtgccgctgagccgcttcgcgcaacaggtgattggccagcagcgggatatcttcggcgcgctcgttgagcgccgggatcttgaggttcaccacgttgaggcggtagtagagatcctcgcggaactcgttcttcgccatcgccttttgcagatcgcggtgggtggcggagatgatgcgtacgtcaatgtccagatcgcgattgctgccgagcggccgcaccttgcgttcctgcagcacgcgcagcagcttcacctgcagcgacagcggcatatcgccgatctcgtcgaggaacagcgtgccgcccgccgccgcctggaacagcccttcgcggctgctgaccgcgccggtaaaggcgcccttggcgtggccgaacagttcggactccagcagctgctccggcagcgcgccgcagttgatggcgatgaacgccttgctggcgcgcgggctggccgcgtggatcgcctgcgccaccacctctttaccggtgccgctctggccgttgatcaatacgctgacgtcggactgcgccaccattttcacctgctccagcaggcgcagcatcaacgggctgcgggtgacgatgtcttcccgccaggcatcgtcgccggccgggctggccgacagcgcgagcgcctcgtcgatggccttgtacagcgcatcgcgatccaccggcttggtgagaaagctgaacaccccctgctgggtagcggccaccgcatcgggaatcgaaccgtgcgcggtgagaatgatcaccggcatgcccggctgatgtttttggatctcggcgaacagcgccatgccgtccatctcatccatgcgcagatcgctgatcaccagatcgatctgttcgcgcgccagcaggcgcagcgcttcctggccgctttcggcggtggtgacgtgaaaaccttcgctggtcaggcgcatgcccagcagcttcagcaggctgggatcgtcgtcaaccaataacaggttggccggtttgcgtgcggtcattgcgcgtgggactccttattggcagggtgcggcgtataggtgtcttccggttcaaccggcagcgcagtgcccttttccggctcgtcctgcggctcagcccctttcgcggccgcgccgtttttaccggcggcttcgcccttttgcgagcctgtgccgttgtccggtatttccccttgcagctgcttgcgcgatgagagctggcgctcgatgtcggtcaggttttccagcttgcgcgaggtgtcctgcagctgcgattgcaagcgcgcctggctctggcgcagcgaatcgatctggctgtcgctgctttcctgcagatgctgataacgcgctttctcatcgaacagcgtgatctgcagcatctgctgctggcgccacagctgcgtcagtggacgcagcgaaccgggaaactccatccggtagctgttgatcctgtcgatcatctggcggcgttcgccggaggtcggctgtgcgctccccagcaggatgctctgtttgaaaacgccggaccagctgtcgccaggcaccgttttcgccagcgcgcgcgcctgggttgagccgatgcgatcggcgcagtccatcgcacgcagccagtagagcgcgttatccagcgcgtccttgtcgtccaactgccacagggtatcgcaggccgcggtgcggtaatcgatcaccttggtatccgggatcgcttcttgctgctgagcgctcaggccgccgctgaccgcgcgatcgacgcagcccgccagcaacagcggcataaagaaaacggcgcccaaccagctgatcgggcgtttgccgagcggcgctctgtgcgtggcacgcggtgaacgttcggtctgcgaaagacgaaggcgtttagaccatgtgtacattatttattcattctcggcggttaacggcagttcaatgcggaagcagacgtctgcaccggcgaccgtcgccagttgcagctcaccgcgcatgcgacggatacagtcctgagcgatgctcaaccccagtccgcttccttttaccgccccttttcgctggtgactaccctggaaaaaaggctcgaaaatcatggctctttcagcctcggggatcggcgtgccggtattggcgacgtcgatttgcacccgttgtccaacctgacggctgcggatccaaatgttaccggattccttgccgtagtgcaccgcattggagtagagattatccagcacgcgcattaatagcgtaggctctgcccagcagatttccgcctccagcgcgatttcggtggaaatcatcttcgcccgcgccggcaaactgtgcgcggcgaccaccaaatcgaccatctcgcgcagctcgacgttctcgtgttccgccgggccgtcggccagtttgcggttgtaatccagcagttgttcaatcagctgctgcaggtggcgactgctgttgtcgaggatcgccaccacctctttttgatcggaggtcagcggccccgccacttcgtcggccagcagttcggtgccttcacgcatgctggccagcggcgttttcaactcgtgcgagatatggcgcaagaactcgtggcgctgcgattccagccacgccagccgctcgctcagccaaatgatgcgctgcgccagcgaacgcagctcgcgcggccctttgaacgacgcggtgctgcccagcgcgcgcccttcccccaggcgattgatcatccgttccacggccttgaccggcccgatgatcatgcgggtgaacagcaccaccagcagcacgctgaccaggaacaacagcagcgcctgccagccgaagaactggccgcgctcggcgatggcttgctgcagctgctggccgcgcgagaacaccaccgcgcgcgtggcctgcaccatttcggcgttggaacgggagaacgattcgagcagggccgaagcctcttggtccggcccgctgttatggcatttgatcgccgccagctgggtcagcaactgacgcagcgtttggtagtagcgctcgtccggcaggatcggcgcgtgggcgtccagcatctgcgaatactgtttgcgctggttctggtacagcttctgcagcgtaggatcgaccagcacgcagtactgacgatagctgcgctccatctccagcgccacgctggtcatcgcctcgctgcgccgcgcgtccaccagcgtggtgcggttgatgtccgccgcctgcgcgctgaggtgatccaggctctggtaggcttgataggccagcaccaacagcggcaacagcaccaacaggaaggccagcagcaccaattgccgcagcgaacgggggaataaacgccattttttcaacgaaatcatctcattctctcagctctgtcacgatgctaactgactcgccggaaagagaaaagcccggcaggggagaatcctgaacgcgcaaggaaaaagccgcgggatcggcgaagcgcgcccatgggcctggcctgccgacggcatgcggccccggtaacatcaaccggcgcgaaaacgagagtgtggggatagcgtctgcgttcgagggcataggcaacgaaacgggcatagcgcagcgttgagaattgacatcggggcaagaaacttgccccaacgcaaggaaagtgtggatgcccttaaacctcgtccccagggtgatgtagcgcagcggctggcatcgaacaggacgaatagcatccgtaagtatccaggattgatgaacccttcatcacagttggatacaggcggtgcctcactccacgtgtcgcccgatgcttgataaagccgcttgcgcggtctgttatcggtttggttggacgataggcaccatttctttggcatcattcggaggcttatgaggcgatttgccgtctaattacggcgccgtcataaaaaggtgaatgagcagccgccaagaataatgcacgtagcgtgccaactttgcaataaaaataataacacaatgattttatttaaaaataaaattacatcagcaaattcccccacccattacgcactgatgagcgatgaaaaaaacgccgtgctgtcgccaaatgcagacaactaaagtcaaacctgcttacctacaataaaatcaattagttaaacgtctccatttggcgacaggggaaatagcgcttgtcgcaaaatgcagacactgccgccagacggcgaacgccggccataaaaaagggcgcaattgcttgcgccctctgtacggtggtgatcgtttttagcccagctgcttacgggcgttgcggaacatacgcatccacgggctgtcctcgccccactcttccgggtgccaggagttgctgacggtgcggaacacgcgctccgggtgcggcatcatcaccgtggcgcgcccgctggcgctggtcactgcggtaatgccgttcggcgagccgttcgggttggccgggtaagcttccgtcacctgaccggcgttgttgacgaaacgcagcgccaccaggccgtggctttccaacgccgccagatgcgccgcatcgcgcacttcgacgtgcccttcaccgtgggaaacggcgatcggcatgcgcgagccggtcatgccctgcatgaacagcgacgggctggccgccacttccaccaggctgaagcgcgcctcgaagcgatccgacaggttgcgcacgaagcgcggccagtgttcggcgcccgggatcagctcacgcaggttggacatcatctggcagccgttgcatacgcccagcgccagcgtctgcggacggtggaagaacgcttcaaactcgtcgcgcacccgctcgttgaacaggatagacttcgcccagccttcgccggcgcccaggacgtcgccgtaagagaagccgccgcaggccaccagcgtgtggaagtcctgcagatcgcggcgcccggccagcagatcgctcatgtgcacgtccacggcgtcaaagccggcgcggtggaacgccgccgccatttcaacgtgggagttcaccccctgctcgcgcagcaccgccactttcgggcgagcgcccttggcgatgtacggcgcagcgatgtcttcctcaggtgcgaaggtcagcttcacgttcaggccgggatcttgttcatcctgcttggcctgatgttcctgatcggcgcacgccgggttgtcgcgcaggcgctgcatctgccaggtggtttccgcccaccaggtgcgcagcgtattgcggctttcgctgtacaacgccttgccatgttggttgatgacgaaacgatcgccggcctgcgcgctgccgatctgatgcacgttgtcagtcagcccatgctgagcgaacgcctgcttcacctcgtcgagacgttcggcgctcacctggatcaccgcgcccagctcttcgttgaacagcaccgccagcgcatcgtcgccgaggccatcgaggttaacctctacgccgcagtgaccggcaaaggccatctccgccagcgtcaccagcaggccgccgtcggcgcggtcgtgataagccagcagcgcgcgatcggccaccagctgctgcatggcgttgaagaagcccgccagctgcgcgacatcgcgcacatcggccggtttgtcgcccagttggcgataaacctgcgccagcgcggtagcgcccagcgcgttatggccgttgcccagatcgatcaacagcagcgcgctgtcgcccttatcggtgcgcaattgcggcgtcacggtgtggcgcacgtcttccacgcgggcaaaggcggtgatgaccagcgacagcggcgaggtcatttcgcgctgttcgtcgccttcctgccagcgggttttcatcgacatggagtctttgcccaccggaatggtgatgcccagcgccgggcacagctcttcgcccaccgctttcaccgcttcgtacaggccggcgtcttcgcccgggtggccggcggcggccatccagttggcggacagcttcacgcgcttcaggctgccgatttccgtggcagccaggttggtcagcgcttccccgaccgccaggcggccggaagcggcgaagtccagcagcgccaccggcgcgcgttcgccgatcgacatcgcctcgccgtaatagctgtccaggctggcggtggtgaccgcgcagtcggccaccgggatctgccacgggccgaccatttggtcacgcgccaccatgccggtgacggtgcggtcgccgatggtgatcaggaaggttttctccgcgacggccggcagatgcagcacgcgcttcaccgcgtcggccagcgtgatgtccccacgctgcaccgcctggccctgcgcctgcagacgggtgacatcgcgggtcatcttcggcgttttgccgagcagcacgtccagcggcatgtcgatcggttggttgtcgaagtggcggtcgttcagcgtcaggtgctgttcttcggtcgcttcaccgatcaccgcataaggcgcgcgctcgcggcggcagatctcgtcgaactgcgccatctgcgccggggcgatcgccatcacgtaacgttcctgcgattcgttgcaccacacttccagcgggctcatgcccggctcgtcgttgaggatatcgcgcagctcgaagcgcccaccgcggccgccgtcgctcaccagctccggcatggcgttggacaggccgccggcgccgacgtcatggataaacaggatcgggttctggtcgcccagctgccagcagcggtcgatcacttcctgacagcggcgttccatttccgggttgtcgcgctgcaccgaagcgaagtccagatcggcatcggactggccggacgccatcgaggacgccgcgccgccgcccaggccgatattcatcgccgggccgcccagcaccaccagcttggcgccgacggtgatttcccctttctgcacgtgatcggcgcggatgttgccgatgccgcccgccagcatgatcggtttgtggtagccgcgcagctcgacgccgttatggctgttgacgcgctcttcataggtgcggaagtagcccagcagcgccgggcgaccgaattcgttgttgaacgccgcgccgcccagcgggccttcggtcatgatgtccagtgcggtgacgatgcgttccggcttgccgaagtcctgctcccacggctgttcaaagccgggaatgcgcaggttggacaccgagaagcccaccaggccggccttcggcttggcgccgcggccgggggcgccctcgtcgcggatctcgccgccggagccggtcgcggcgcccggccacggcgaaatcgccgtcgggtggttgtgagtttccaccttcatcaggatgtgcgcgtcttcctgatggtaatcgtacgtgccgttctccggcgcggcgaagaagcggccgacctgcgaaccttccatcacggcggcgttgtctttatacgccgacagcacgtagtccggcgtctgctcgtaggtattcttgatcattttgaacagcgacttgggctgctgctcgccgtcgatgatccagtcggcgttgaaaatcttgtggcggcagtgctcagagttggcctgcgcgaacatatagagttcgatatccgtcgggttgcgccccaaaccggtaaaggcattcagcaggtagtcgatctcgtcctgcgccagcgccaggccgagccggacgttggcttgctccagcgcagcgcgccctgcgcccagcacgtcgaccgactgatacggcgccggctgatggtgcgcgaacagctgttcagcctgttgcagctcgctgaagacggtttccatcatgcgatcgtgcaacagtgcggcgagctggcgccactgggtttccgtcagctcgggcgccttgacgtagaacgccaggccgcgctccaggcgcagcacctgttgcaagccgcagttgtgggcgatgtcggtggctttggaagaccagggagaaatggtgcccggacgcggcgtaaccagcagcagccggccttcaggggcgtgttcggcgagagaaggaccgtacttgagcagacgctgaagcttggcgtgttcttcggcacttagcggtgcgctgacatcggcaaagtggacgtactcggcgtagatatcactgacgggcaggtgagcgtcctggcagcgggacagcagtttggtaatgcgaaaagccgataaagcgggcgaaccacgcagaatttccataatcaaagttctctcgtcttcgaagcgaaggataagacgcttcattgggcgcaacaggggaaaacgcgcgtcattatagagaatcctcggcgccgacgaaaccgtttgcgtagggattattgataaaagcgtgccgcaccgtcgaattgtcataacgtgtcaataaagttgcacactggcgttttgttgcgcaaaatgccccccgcactggtgatttaaccatgagaaaagtcgcggttgtcgtcgccggcgtacctgtgccaccactggataactatttgaaacgtcttaaaataaactacatcctcatcggcgttgtcactctgcttctggctctcgcgctgtggcccaacatcacctggcgcagcggccagggcgggcaactccaggagatcatttcccgcggcgagttgcgtatcagcacgctgaattcaccgctgacctatttcaacaccaagcaagggccgggtgggctcgactacgaactggccaagcgcttcgccaactacctcggggtgaagctggtggtgatcccccatcagaacatcaatgacctgttcgacgatctggacgacgacgacgccgacctgctggcggcgggcctgatctacaaccaggagcgcctcagccgcgcgcgcaccggcccggcctactactccgtttcccaacagctggtgtaccggctgggcaccccgcggccgaaaagcttcgccgacatcaaaggcaagctggcggtcgcctccggttccgcgcacgtcagcacgctaaaacagctcaagcaggataaatacccggatctcgcctgggagtcctccagcgatctcacctccaaagaactgctggagcgggtggccgacggcaagctggactataccctcggcgattcggtgaccatcgcgctgctgcagcgcatccatccgcagctggcggtggcgttcgacgtcaccgacgaagagccggtcacctggtacctcaaacgcgacggcgacgacagcctgtacgcggcgatgctggatttctacagtcagatggtggacgacggcaccctggcgcggctggaagagaaatacctcggccacgtcggcagcttcgactatgtggacaccaaaaccttcctgtcggccatcgattcggtgctgcccaacttccgcccgctgttcgagaagcacgccaacgagatcgactggaagctgctggcggccatcgcctatcaggaatcgcactggaatccgcaggccacttcccccaccggcgtgcgcggcctgatgatgctgacccgcgccaccgccgacggcctgggggtcaacgatcgcctcgatccggaagagagcattcagggcggcgccctttacctgcagcggctgatggccaaggtgccggacagcgtgccggaagacgagcgcatctggttctcgctggcggcctacaacatgggttggggccatatgctggacgcgcgcaagctgaccaaaacgcaaaaaggcaacccggacagctgggtcgacgtcaaacagcgcctgccgatgctcagccaaaagcgctactacccgcagctgacctacggctatgcgcgcgggcgtgaagcctacaactatgtagaaaacatccgccgctatcaggtcagcctggtgggctatctgcaggaaaaagagagaaaggcggcgcaagcggccgccgagcaggaagcgttggggaaaggctacccgacggtgatgccggaactggcgctcaactactgattattccggcttatccgccgcccgctgcgccagcctgagcgcttttttctgttcgcggcgcaggcggaagaaattgctcagggtggcggcgcattcgtccgccagcacgcccgagacgatctccacctgatggttcatgcccggatggcgcaaaatgtccaccagcgagccggccgcgccggttttctcgtcggcggcgccgtacaccaaccggcggatgcggctgtgcaccatcgcgccggcgcacatcacgcagggctccagcgtgacgtacagcgtggcgttcagcaggcgatagttttgcagcaccgcgccgccctggcgcagcgccatgatctcggcgtgtgcggtaggatcgtggcggccgatcggccggttccagccctcgccgatgacctgattgtccagcaccagcagcgcacccaccggcacctcgccctcttcctgcgcgcgcagggccagctgcaatgcctgacgcatccagtactcatcgttatattcagtcatcgcataattcctcgtgcgcttttgcggcgggcattatacacactagcctccctttgtcgtagccgcccgccaatggctatactggccgaatcggccgatgattcagggacaagaagcatgaaactcagtaaaaagaacgccgtcgtggtgcgcaaggcgctggacggttgggttggggaaggcgccatgacgcccgaacaacggcagcaactgctgcagcatgtggacgtgcaacctttcgactggcggcgactggcgcgctatgcgtttctcgccgcgctggcctcgctgctgatcgccgtcaccagcctgttcgccgacagcgaactgcttgcatggctgagcgaactgttccgcttcgacgcgccggtgcgcatggcgatcgccggcgtactggcggcgctggcctacgtttgggcgctgcgtcgtcgtcaacgccatccggaaaaacgctacggcaatgaggcggcgctgtttgtcgccgtgttgctcaccgcctgcgccttatggcaactgggcgtctggctggataacggcagcgggcgggtttccgtgctgctgctggtcgccgcgctgctgtacggcgcgatcggctggttcagccgctccgggctggtatggtggttcgccctgctgtcgctcggcaatgccttcggcgccgagaccggctacctgtccggctggggcgcctactggctcggcatgagctacccgattcgctttatcgccttcggcggggtgctgatcgccgccgcattgctgctgcggccgctcttggcgcagcgcggcctgcagcgggtgtcgctggcgatgggcctgctgtacctgttcatcgcgctgtggctgctgtccatcttcggcaactacggcgatctcgacagctggtaccgcgcgcgccagattgagctgttccactggagcctgctgttcgggctggccgccctcgtcgccatctggctggggttgaagcatgacgacgccatgctgcgcggtttcgggctgaccttcctcggcatcaacctctatacccgcctgttcgagtttttctgggacagcatgccgaaaacgattttcttcgcgctgctcggcctgagcctgtgggcgttggggcattatgcggaaaagatttggcagctcgggcgcaaaccacacgacgtaaccgacgactgatcgcggcagcgacaacagcaaagggcggaattctccgccctttgtttattccagctgctgcagctcgccctgcttgctcacccgccagcggtgctcgcaaaagaacagcagtggattatcctgcttgctgtcgctgtaaccgctgtacagcttcagcggcgcgccgagccgttgctccaactgcaccactttttgcacgcccaggcagcgcagggtcaagacccaaccgccgcagcggcgcgtgatgcggctgccgatcaaccgcacccgcggcagaaacgccgaatcccgatacacctgctccaccagttgctccggcgagccggtaatcagccacacttcggcatcgtgctcctccagatactgccgcagccgcatttgcaccaccggaaacgcggtcaccttctggcggaaagcctcgataaactgccgctccagcgccttcagcgtcgcttcggtacgcccgaaagtaatcgcccacagcagctggctcatcggccagcgcgcggcgcgccccagcagcaacagcgccagaccaatcaatggcaacagcggtatcaccagcagcagattcagcggtaaacggcgcagcaggaaacgcaagaaactgccgaacatatcctcctgatgcagagtgccgtccagatcgaaaaagaccacgcggcgccctgctgcggccgacggttgctgcttgtcgttcaaacgctactcctcgggatcgtcgaaccccatcatccaggtgaagagaaaaccggcgataatcgtaatcagcatccccgccagatacaacatcaccttacctgagacgatggtcaacgccaaaggcagccccgaaatgccgaaggtgatgaccgtcgccaccttccagtagctgatcagcgcgccgcctaccgcgccgccgaggcaggcgccgataaacggccggcccagcggcagcgtcaccccgaagatcagcggctcgccgatgccgagaatgccgaccggcaacgcccctttgatcaccttcttcagccgcgcgttgcgggttttcagcagcaccgccagcgccgcccccacctgaccgacgccggccatcgccaggatcggcaacagcggattggaaccgtgcgcctgcaccagctcgacgtggatcggcaccagcccctggtgcaagccggagagcaccagcggcaggaacagcccggagagcagcgcccccaccagcagcccgcccttgtcgatcgccagattggcgccgtgggcgatggcatcggaaatggcgccaccgatcggctgcaggatcaggatcgccaacgaggcggtgaccagcgtggtcagcagcggattgaggatcagttcgaccgactccggcagcagcgtgcgcaggcgcttctccacccagcacatcaacgccaccaccaacaatacggcgatcaccccgccgcgccccggctgcagcgcctccccgaacagggtgatctgcgccagcgccggactggagagaatgccggccatcacgccgcccatcgcttgcgaaccgccaaacacccgcgcggcgttcaccccgaccagaatgttcataatggcgaataccgcgctgccgaagatcgccagcagccccagcgcgttcgggtagtccaacgccagctgtccggcgatgtcgggccgcttcagcaggttgatgatgccggtgatcagccccgaggcgataaacgccgggatcagcggaataaaaacgtcggccagctttttcagcgcgccgctcatcggcgcagcgtatttttgcttggcctgcgccttggtgcgggcggcgtcaccaacggcgggctgcgcgctgccgctcagcaaggcgcgcatgacgtccaccaccttggcggcggcgcccggaccgacgataaactgatgctgttcaccctgtttgatatagcccttcacccccggcagctgcttgagggccgccagatccaggcgctgctcatcgctgacctcgacgcgcacccgcgtcatgcagttttccagtttgaggatattgccctcgccccccacgcccgccaggatctgtgtcgccaatgccgttgtcttgtccatcgccgcccccaccgtaaattaacgcgccagcgccgcgcgcaggtagccatcgtgccgctgcagccgctgctgcgcctcttcggcgctgacgccggctaaaatcatcaggatcgccggtttgacctcaaagccggtctgcgccaacgccgcctccgcctgagcgcgttcggcgccggtggcctccatcacgatgcggcaggcgcgatccaccagtttgacgttggtggccttcacgtccaccatcaggttctggtagaccttgcccagtttgaccatcgcaccggtcgacagcatgttgagtaccagtttctgcgcggtgccggatttcaggcgcgttgagccggtcagcgcctccggccccaccaccggcgaaatcgccacctgtgcttcgtgcgcaatcggcgaatccgggttacaggagatggccgccgtcgggcagcccagcccgcgcgcatagcgcagtgcgccgatcacgtagggcgtacgccccgaggccgccagccctaccaccatatcaacggcggtgaggttcagcgcccggagatcggcttcacccagggcctcgtcatcttccgccccctccaccgctttgagcagcgcgcccggcccgccggcgattagccccaccaccacgccgtgcggcacgccgaaggtcggcggacactcggaggcgtccaatacgcccaggcggccgctggtgccggcgcccaaataaatcaaccgcccaccggccttcagcgccgccgcggccaaatcgaccgcctgcgcgatcgccggcaacacctgttcaatcgcctccggcaccttgcggtcttcctggttaaagcaacggaccatgtccagcgtcgacatttcatccagccccatggtggccgggttacgggtttccgataccagtgcgcctaagttcatctgttcacctttgaatttttaattcacaaaattaaatcaatatttgaatattttattcaacaaagcgagcgctatttgctattttaacggtgagctcacaaaaattttcaccgcgcgttttcgccctctgcatggcaaaatggccgctggtttccagggaaagaacaatgagtacccttctgcgcattcgccagatgtatccgacactggcgcaaaacgaccgcaagctggcggactttctgctgaataacgccgagcaggcgcgccatctcagctcgcaaaagctggctcagttggccggcatcagccagtcgagcgtggtgaagttcgcccaaaagctgggctataaaggctttccagcgctgaagctggcgctgagcgagacgctggcccaaccgcaggccgaaccagtggtgaccgttcacaaccacattctcagcagcgatacgctgaaaatcgtcggtgaaaagctgctggcggaaaagcaggcggcgctgcgcgcgacgctcgacatcaacagcgaagagcggctgcaccaggcgctggacatgctgcgccaggcgcgccgggtgatgctgatcggcatcggcgcctccgggctggtggccaaggatttttccttcaagctgctgaaaattggcgtgatggcggtggccgaagcggatatgcacgtccagctggcggcggtgcaggcgctggacaaacgcgatctgctgctggctatctccttcagcggcgagcggcgtgaaatcaatctggcggcggaagaagcgcgccaggccggcgccagggtgctggcgctgaccagcttctcgcccaacggcctgcagcaacgcgcggaccactgcctctataccatcgccgaagaaccccacacccgcagcgcggccatctcctccagcacggcccagttcgccctcaccgacctgctgtttatggcgctgatccagcacgatctcgatcatgcccgcgatcgcatcaaacacagcgaacaattgatgaaaaagttggtttgacgcgtataatggcggccgataaaacgccgccagttcaattatttccattctctgcattcgaaaaataatgtgcgggcggtgaacagctcaattgtcggacagtaattgagcgtgcatggacggcattatttgacgatatcattatgaatacacacactgttattttagataagttacggcattctgtggctcatccgattctgcgtacctttttactctatgtcattactgcattgattctaatcaaggcgatgggatatagcggtggaaaaggcattgatattctgtaagcacacccgttttagttccacgcactttttgagatctaatccccagggaaagcctggcaccatttctacacaaacattaaggcgaagtcccatcaccctgcccctcctctcagtaaagacatcggttaatgttgaatgagacttagttttaattctctaataaaaagcccacttagcggcgggtcattctattgagtttagcttactctctatatgaaaaaggccaccacaagcggtgaccatttaaaattgattaatcaatcaattggaactcttcttgctcaagatatttttcaactgccttcttatcaacctgagcctcgagcttacacataagcctataattaacaggtgcatttgcctgcattgactctactttcaaatttagattagaaccagatgaggcgagaaaaattccaataactttagcaatataacgagggcagtaaccaataatctctactggtccaccagtacgaatcattaccgcacattcatcatattcattttgtggatcggggcaaagatatagcttttcaccatttttcaggttactaattctctcttttgccgaatctggaagatacgaaatcccatgagcgaaaaagtagtaatcgaaagttccatcgtcctgaatttcgattcgtttgaatacctgaagattatcagtagctctagccccaccagatcgggctaacatttccattgcagaaaactcgtttttatcaagaccaagccacttcataaactgagggtattctggtcttctcgctgatagcacacgatttttaaataaaggaaataactcttttgaggagtatgtagatctaatgtcatccatgccactaaagggaatgaagtttttaactttcatagcaccttttgtatatttaaacacataatcatcttctctctcatttaactggcctacaacatgccaatcccgagtttcgggtgactgccacgctaaaaatagtgagttatgcgttttcatagtttaacaaccttctcttattttccttcaacatctctaggacaaaagcctttgcatgcttatccatatactcatcagggattttactcacgatgctatgaaagtcttcatctgatagccctcttaatctttcaagccaaaaagctttagctttaggctttttttcaccagcacagtagaaagcttcaacagtaagcaatggcttcttatcgttctttagacggtagagcaaagacctagctttactaacgaagcactcaactctttgatttttatctttggatgttaacccaatgattcgtctttctgtcgtaagttctcttccaagactcgccgcatggtcataacttgggcaaaggaaacgttcacctgtatcaccattaactaaaatggcccaattttcatggtgacgatcctgattgctgatcagtgcatcaagcataagatagccacaaaacacatcccctgggctcaattcctcaagtcccaaggaagaaggcatgactttgatatgccccgcatctaagcagcctaaaacacggctaactgtatgctcacgcactttaacccttttctcatctacaccttctggtttggggtaactacctgattcaaactgatgcaggacttcgttccccattaccatgttaaaaccatcagtcacaaggttaggagtgattacacctggccgcccttcaaattttgccagctcgtaagtagcacatgggataccgagcttaaaacacaactgctctgcacacttttctgaccaatgctcccccgtgcccgctctcgaaaatttgaacagcatcttccctgtgcttgttgagtaccaaaatttttctttcgtacctaactgctccaaatcctggacatcagaagtgatctgattgatttcaaacatcatacgcccgaattaatgatttccacatccgtaagattatcactctatcttacatcagttttcatcaatacgagtcctaatttggaatcagcaaggaactgtttaaatatacagtacaaagaatgaaaattgaagttaaagaactcctacacaacaaaaaacccgctcagtagcgggtcattttgttgcatcgcttgatggtacagcttcgcgaaagcatacctgtgctatgcatttttttggtttattttgcataattattcaatttaaacatatatatacgcattaacagcgacgtataccgcagaattgaatatttcaatgcaccaacacccccgatcatccacctgatcgcgattcaaccaggaggcgtaatgattttgcatgtagcgccccagcaccgacaccgtattgcttcagcccgtgtagaacagtttccgatgatatagaccgggttatcgtgcttcatcgatgccagcaccactttttccatgaagttgcattcctcccgggcgtcagcagctaccagcatcaactcaagcgagcggtgcggccaagaactcatcattttggggatataatgcatctgtgttacagtgcgcggcattgatatttccttgtatcagaggccaccagcactaagctcacacatgaggttaaatctggaggctaaaaaagcatgtgttaccattctgtgttgctgaacatgggttttcaatgcttcaaacactgtataaatacacaaatagtgcgggatcgtgcgcaataaccaaagcctataaatgcatgatttaaacagactaaactcgtaagtgattgatatggcattattaataacaaagcggtgcatcaactgcgacatgtgcgagccggaatgcccgaaccaggcaatttcgatgggcgatgagatctaccagatcgataccgatcgctgcaccgagtgcgttggccattacgatacgccaacctgtcagcaggtctgccccatcgacaacaccattatcaccgatccgcagcatcgtgagaccaacgaacagctgtgggacaagttcgtggtgttgcaccacgccgatcgcatttaatccgccgcaggactgacaagggcgccataggcgccctttctattttcagctttcgacgatcaccgtcgcacaggcatagcgccgttcgtcggccagcgaaacgtggatcgcggtgacccccatctcccccgccagctcggcggcgcggccgtgcaaacgaatattcggcttgcccaacgcgtcgttgaacacctcaaactggttgaacgccaggccgttgcgaatgccggtgccgaacgccttggcggcggcctctttcaccgcgaaacgcttggccagaaagcgaatcggctgctggtgctgctggtacagcgcccattcggcgtcgctcagcacgcggcgcgccagacgatcgccgctgcgctccaccaccgcttcgatacgcgccatctcgacgatgtcggtacccagcccgagcaccgccattaccggcgcgcttcccgcatcagcactttcatgtcggcaaccgcggccggcagcccgctcatcaccgcctggccgataatcgcatggccgatgttcagctcgtgcatttccggcagcgcggcgatcggctgcacgttatggtaggtcaggccgtggccggcgttgaccttcagccccttctcggccgcgtaggcggcggcgaccgcgatgcggtgcagctcggcctgtaccgccagctcgccctgcgcttccgcgtaggcgccggtgtggatttcgatataaggggcgcccaccgccaccgccgcgtcgatctggcgatgatcgggatcgatgaacagcgagaccaaaatacccgcctgcgccaggcgctcgaccgccacgctcattttgtccagctggccggcgacgtccaggccgccttcggtggtcacttcctcgcgtttttccggcaccaggcagcagaaatgcggctgcagctcaatggcgatgtccagcatctcgtcggtcaccgccatctccaggttcatgcgcgtctggatggtctggcgcagcaagcgcacgtcgcggtcggtgatgtggcggcgatcttcgcgcagatgcacggtaatgccgtcggcccccgcctgttcggcaatgaatgccgcctgaaccggatccgggtattgggttccgcgcgcgttacgtaacgtggcgatgtgatcgatattgacgcccagcagcaaatcagccatgacaacctctaaatacgattttcagtgccagcagtttacacgcgggcgcagggcggcaaaaggggaaaaggtcaggcgtcgtcaaccggcgtattcggctgtttgcgcacgaactggcggaacagttcgcggctcttcaacggtttgccgccgaggtagggtttcagcgccatgcgggtgaaacgcttggcggcgcgcagcgtctcggcatcgggaaactgccgctccgccagcgcgcgcagttcacgcccggtgaagctgtagtgatccaccaccaggctggcgataaagcctttctcttcgcggtaacggtaggtcatggcgtcatccaccggcaggccgctgccggcgcagtgcaggaaatcgaggccgtaacccaggtgctgcaacaaggccagctcgaactgacgcagcgcctgttccggcgagctgtcttccgccgccagcgcctgcaggcattgcaggtagtcgaagaacagcaccgagtagttggtttcctgctccagcacgcgcgccagcagttcgttcacgtacaggccgctgtaaagcatcatgccgctgaggggtaaaccgagagagaccgcttcggcgttgcgcagcgttttcacttcgccgcggccgccccagcgcactaacaggggggtaaagggctgcaggcaacccttcagattggagcggcggctgcgcgcgcctttcgccagcaagcgcacccgcccatgaccttcggtaaacagatccagcatcagactggtttcactgtacggccgcccatgcaggacgaaagcgcgctcccagccgtccacggatcgttacttcagatcgtcaacatagcccaggctgcgcagcgcacgttcgtcgtccgcccaaccggatttcactttcacccacagctcgagatgcactttggcgtcgaacatctgttccatgtcctgacgcgcttcgatgccgatggttttgatcttggcgcccttgttgccgatgaccattttcttctggccttcgcgctcgaccaggatcaggccgtgcacatcgtagccgccgcgatcgttagccacgaactgttcgatttccaccgtcactgagtacggcagctcttcgcccaggaaacgcatcagcttctcgcggatgatctcggatgccataaagcgctgggagcgatcggtgatgtaatcttccgggaagtggtgttccgcttccggcagcagcttgcgcacgatgccggcaatggtgtcgacgttcatccctttctcggcggagataggcaccacgtcgaggaagttcatctgctggctgaggaacgcgatgtgcggcaacagcttggatttgtcggtaacgttatcgaccttgttgatcgccagcaataccgggcagcgcaggctgcgcagcttgttgaccaccatttcgtcgtcggcggtccagttggtgccttcgaccacgaagatcaccagctcaacgtcaccgatcgagctgctggccgcgcggttcatcaaacggttgatggcgcgtttttcttcgatgtgcagccctggggtatcgacgtagatcgcctgataggcgccatcggtgtcgatgcccatgatgcggtgacgggtcgtctgcggcttacgcgacgtaatggaaaccttctgccccagcagttggttcagcaacgtcgatttgcccacgttcgggcggccgacgatggcgataaatccgcagtgttgttttacttcgctcattcaagctccagctttttcagcgcttgttccgctgccgcctgctcggctttacggcggctcgagccggtgcccaccacgggctcgctcaaaccactcacctggcagtggatggtaaactcctggtcgtgcgcttcaccgcgaacctgcaccaccaaataagaaggcaacggcagatgacgcccctgcaaaaattcctgcaagcgggttttcgggtctttctgcttatcaccggggctgatttcgtccaaccggctgcgataccagtccaaaatcagacgctcgacggtctggatgtcgctgtccaggaacacgccgccgatcaatgcctccaccgtatccgccaggattgactcgcggcggaacccaccacttttcaattcgcccggcccaagccgcagacattcgcccaggtcaaactcgcgcgccatctccgccagcgtgttgccgcgcaccagcgtggcgcgcatgcggctcatgtcgccctcgtctacgcgaggaaaacggtgatagagcgcattggcgatgacaaagctcagaatcgagtcacccagaaactcaagacgttcattgtgtttactgctggcgctgcggtgagtcaaagcctgcagtaaaagctcctgctgttgaaaagtgtagcccagcttccgctgcagcctgtttattacgatggggttcatgagttaccaatagatcaagaatgcgtcaaaaacttgcagcacacggaacaggcctgcttcgccgaaagccgatccaaagctgtttcgtttgcagtggctcccagcaggagccaacttttatcgctcgagaaggtattctacaacgagtggaaacataatgctgtgtttatatcctcttaatctttcacgccgcagtaggctgcggcgtgaaattgacagggaataaatcagcgattaatgaatgccgccgatccggctgaaacgcacgccggtaggccactcgccttcctgtttttcaaagctcatccagatggccgtggctttgcccaccagattcttctccggcacaaagccccagtaacggctgtccgcgctgttgtcacggttgtcgcccatcatgaagtaatgcccggccggcaccacccactccgccaacggtttgcccggctgttggtagtaagcgcccacccgatcctgcgcgtccggcacggtcaggatgcggtgcgtgacgttgccgaggctttcctggcgctcacgcatgcgaatgccgcccgacggcacgttatcgttcagcgggatctggtagaagccgttgctggcctcgcccatgccgctgcggctgaacagctgcacgaagtcgctcggctgcgcatcggcgtaggtcacggccagcgcggtatcacaggactgcccgctgttgcaggacggctgcaccgtgacgcgcttattcaccggatcgtaagtaatacggtcgcccggcaggccaatcacgcgcttgatataatccagtttcggatccagcggatatttaaataccgcaatatcaccacgcttcggatggccggtttcaatgagcgtcgtctgggtaatcggatctttaatgccgtaggcatatttctccaccagaatgaaatcgccaatcaacagcgtcggcatcattgagccggacgggatctggaacggttcgtaaataaacgaacgcaccacaaacaccagcagcaacaccgggaagaccgatgcgccggtctccacccagcctggctgcttcgccactttcgccagcgttttatcgtctacggcgcccgcggtctgctcgttgaccgccgcaatcttcgcgcggcgggccggcgcccatttaaagcgctcgaagcaccagatgatcccggtgaccagggtggccaacgccaggatcagggcaaacatattcgccatgcaaactccctcgtttcgcgaactcgtcgcggttacttgccgtctttaccgacgtgcagaatggccaggaacgcttcctgcggcagctcgacgttgccgacctgcttcatgcgcttcttaccgtctttctgtttctgcagcagctttttcttacggctgacgtcaccgccgtagcatttcgccagcacgtttttacgcagctgcttcacggtggagcgcgcgatgatgtgcgtgccgatcgccgcctgaatcgcgatgtcgaactgctgacgcgggatcagatctttcatcttctccaccaattcacggccgcggtactgcgagttgtcgcggtgagtgatcagcgccagcgcatccacgcgctcgttgttgatcagcacgtccacgcgcaccatgtcggaggcctggaagcgcttgaagttgtaatccagcgacgcataaccgcgcgacgtggacttcaggcggtcgaagaagtcgagcaccacttccgccatcgggatttcataagtcagcgccacctggttgccgtggtagaccatgttggtctgcacgccgcgcttctcaacgcacagggtgatgacgttgcccaggtattcctgcggcatcagcatgtgacattcggcgatcggctcgcgcagttcctggatgttgttcaacggcggcagcttggatgggctgtcgacgtagatcacttccttgccggtggtttccacttcatagactaccgtcggcgcggtggtgatcagatccagatcgtattcacgctccagacgctcctgaatgatctccatgtgcagcagaccgaggaagccgcagcggaagccgaagcccaacgcggtggagctctccggttcgtagaacagggaggcgtcgttaaggctcagcttgcccagcgcatcgcggaaagattcatagtcgtcggagctgatcgggaacagaccggcgtacacctgcggcttcactttcttgaagcccggcaacgctttatccgccggctgacgcgcctgcgtcagggtatcgcccaccggcgcgccgaggatgtctttgatcgcacagaccagccagcccacttcgccgcagttcagcacgtcgcgatcgacctgcttcggcgtgaagatgcccaaacgatcggcgttatacacctggccggtgctcatgaccttgatcttgtcgcccttgcgcagcgtgccgttcttgacgcgcaccagcgacacgacgcccaggtaattatcgaaccaggagtcgatgatcagcgcctgcagcggcgcatccggatcgccctgcggcgcaggaatgtcgcgcaccaggcgctccagcacgtcgggcacgccgacgccggttttggccgagcagcgcacggcatcggtggcgtcgatgccgacgatgtcttcgatttcctgcgcggcgcgatccggatcggcggccggcaggtcgattttattcaacaccggtaccacttccagatccatttcgatcgcggtgtagcagttggccagcgtctgggcttctacgccctggccggcatccaccaccagcagcgcgccttcgcaggccgccagcgagcgggaaacttcataggagaagtcaacgtggccgggagtgtcgataaagttaagctgataggtctgcccatcctgcgctttataatccagcgtcacgctctgcgccttgatggtgatgccgcgctcgcgctccagatccatggaatcgagcacctgcgcagccatttcacggtcggtcaagccaccgcagatttggataatgcggtcagacagcgtcgacttaccgtggtcaatatgggcaataatggagaaatttcgtatatgcttcattataaaagtttttctgccttggtatttctgaattactcgcctatagaaacccgcatggacctaaagcgacagtgaatgggtgaggccgtcttgcacctgaatcgctgcattctacatgccacaccactgaaaacctagcgatcggtgcagtgaaggcattctattatgcgccgctaaatgttacagggcgccccggcgggtgaaaacagatgttaacgcggatgatgcggcctgaacccaaggcttgccggtgcttcgtggtcgtcaaactccggcgctaatacataaccggccacagcgcaataaaccctctccgaaattataaaaaaagaatatttggatcaacctcttagaattccattttgccccacttcctttaggaaaaaccccatatacgccaccaccgtccctcggatagaaagggcatgagctccgcgacaaaacattattcagggcactacatcggcagcccaccggggttcaccagcatatctgcgtacgttgattggaaggtgcattatgatcgataaagggcaaatgctgagccggcacgatttttcaaaggtcaactggggcatactggcggcggcggcgctgctgtttagcgtgggggcggcgctgttggtgctgccgctgctgagcagcattgacgaaagccaggtcatcacgctgttgcaagccggcgcgggcacgattttactcggctgtacgctgctggcgctgcggcattatctgcgtccgacgctgacctatcgtctgtacgagcacggcgtgcgggtctttgacagccaccatcacaaagagcgtttcatcccgtttgagaagatcggcgacatctatcgctttcgcggcggccaggcttttggcgggctgtttgacgttacggcgttccgcgccggtgcagatcagccttggtgcacggttttcagcaacgtcgcccactcgtggcgattggcggacgtgatcgtcgaccaacagctgcagcagcgcgggccgctggcgctgaatgcgctctatcaggggggaacggtgtcgtttcacactatagagggcgacgcgcgctggctgtggcagttgctgctcggcaagcagcaaggcacgccgaccgaaacgctgcggctgagcgccaccctgctgacgacggaacggggaaacgtgcctatcgaacagatccgcgcgttggaaaatcatccgcagcgcggcatccgcttattcgacggccagggaaatgtgctgttcgcgattaactacgattcgctgctcagcgccgatctattcatcgcgctgttggagcatatgatccacaaccgcatccccgcctatcacaacccggcgatgacgcggccatcggtttaaatcagcggggagttttccgcctgcatgcgcatcgcggtaggcggcaacccaatttgcagcaccaccggctggtaatcggcctgctcgcccagacgtcgggccaagcggcgagccagcataaaggccgcaccgccgcccaacacggcgccgactgccgccgaggcgtcgctgccgaaacaatattgcagcagcgtgccgcccaccatcatacccagcagcggcgtcaggtaaaccagcatggcggagcgcagcaggctgccttccgcgatgccgacctcgacgcgctgccccggttcaagcggctgatcgatatgtacctgcagctgatgctcggtttccggcaccagctcgttcagcgcacgcgcgccacagccggagcgcgcggtgcagctgccacagccggccttgggttcacagcgcagcagcgctacgccctgttgccacgaaaccaccgtggcccactctttcatcattacggcgataccttgaaagaaatgctgtcggcgatgcgcttggccgtcgccggcggcaattcgcccacaatcgtgatttcgttgcccgcgcgcacttcggtctgaatggtgcggcgcccctgacggtagtactgctgcccggctccgctgcccgccgggctgacgttgaccgagaagctgaacaggccgtcgctgtagagccgggattccaccggcacggcgacgttcggcaatttgcggcgattgcgcgccacctcgtccacgccggccggcagccagccggtgctccagctgagctggacattttccaccgccggcagcgacagcagcggcggcaggttggccttgagcagcccctgcatcgcgccctgcacctcggcgccgaccgcgaaggagatcacccgatattgctccagcgtttcgccgtcgcgatcgagcaaatccacccgcagcggcagcttggtgtcttcgtccatccagacgatgtagctgtagcgggaaccgtcgcgcgccaccacgcgcagcacttcacacggccgatcggcgatgcgggtgctgcccacggagatgaagtcgtaatacttcgccagacgggtgaaatcggcataaacgatcgccggcagcgcatcgacgatgtgatcgccagtgagcgtgaacggctccagaccgggttcgaagtagctgatcccgccgccgcgctgcaacacttcgcggcgcgggccatccatatgcagcagctggccgagcggcacgttgccgatcaccgcatggcgatagcgcaacgactcgattccctgcttgctgacgctgatgtaggcgagctcgtaattgagagaacggctggcgctgctcatctgttgcaataacgccccggacgcagttggctgcgccggggcgatgctggaatagagcaggctgcccgtcaataaacaaacggagaaccagatttgcttcattactgctgttgcattcctaaagactgagttccgggaacctgaatggcagcctgttgcgggttgccttgctcaagctgcagctgatccgaatgcaggcgacgttgcagttcatagtcctgcagcatggcgttgatacgcttgcgctgttcctgcacctgctgctgttggccgctgccggtggagaaactgtcggcaggaacgcccaggctgaccggcgaggcctgccccatgatcggcagcgtggtgaaggccggcgattcggacgcgttcgatgtcgcagaaggctggttgtagtgctgcacgccgacgatcaccgccagcgacacgcaggccgccatgccgatttgcgtaatctggctcgcccaaggacgcactttgtcccagaacggcattttctgccaggtgtgaggctgcggctgagattcctgaacggcggaaggcaccagccgggcgggttctttctcaagtgcagcggcgacgcgatcggcgatgtcgagatgcatcacttgtccgacatcacctcgcagtgtgtcacgtatcaggtgatagctctgccagctttgttgaagcgttcgatcttgcgacagagaactcaacagctcgctgtcgaacgattcaccatccatcagagcggaaagcttttctttctgcatgcctaagtacccttcctgtgcccgccattgctaacgctggatcagcggttgaactttattatcgatagcttcccgggcgcggaaaatacgcgaacgtacggttccgaccgggcaatccatgatggcggctatttcttcgtagcttagaccatccaactcccgcagggtaatcgccatgcgaagatcctcagggagagactcaatggtacggaaaactatctgtctcagctcttctgacaacattaagttctcagggttcgaaatttctttcagtgcgcccgcactttcgtaattttccgcatcgttggcgtccacatcactggatggcggacggcgcccctgagcaaccagataattctttgccgtgttcacggcgattcgatacaaccaggtataaaaagcgctgtcgccacggaacgattccagtgcgcgataggccttgataaacgactcctgcaccacatcgggcacatcgccctgcggcacatagcgggaaacgagactcgccaccttatgctgatagcgcactaccagtaggttaaacgacttctggtcgcccttttggacccgctcgaccagaacttgatccgttaactgctcgctcatccgaggtaaactctccccaaatccgtctccacgcgtaaaattgtactgccagccatacattattttcctgagcaagcactcgcttggagttcatatagaacacgaagttccatatcgccattgttttttctgttgatgtcaccctatccgtggcttttgcccggacagttaggctaacatgaaattcactcttcttctgcacacatcatacgttatgcaaccatcatctgaacatgttagcgatgtactgatcgtcggcagcggcgctgcgggcctgtcattggcgctgcgcctggcgcagcattgcaaggttaccgttctcagcaaggggccgctcagcgagggagccaccttttacgcccagggcgggatcgccgcggtgttcgatgagacggacagcattgcctcacacgttgatgacactttgattgccggcgccggcctgtgcgacaaagaggccgtcgaattcatcgccggcaacgcgcgccactgcgtgcaatggctgatcgatcagggcgtgctgttcgacaccgaggtcaacgcgcagggcgaggagcattatcacctcacgcgcgaaggcggccacagccatcgccgcatcctgcacgccgcagacgctaccggtaaggaagtagagaccacgctggtagggaaagcaagcgctcaccccaatatttgcgtgatggaacgccgcaacgcggttgaccttattacctcgaacaaaatcggcctgccgggcacccgccgagtggtgggcgcttacgtctggaaccgcgagctggagcgggtggaaaccttccgcgccaaaacggtggtgctggccaccggcggcgcggccaaggtgtaccaatacaccaccaacccggacatctcctccggcgacggcatcgccatggcctggcgcgccggctgccgggtcgccaacctggagttcaaccagttccacccgacctgcctgtttcacccgcaggcgcgcaacttcctgctgaccgaagcgctgcgcggcgaaggcgcctacctgaaacgcccggacggcagccgctttatgccggatttcgacccgcgcggcgaactggccccgcgcgacatcgtcgcccgcgccatcgaccatgaaatgaagcgcctgggcgccgactgcatgtatctggacatcagccacaagccggcggcgttcatcacccagcacttcccgatgatccacgaaaagctactgacgctgggcttcgatctgacccggcaaccgatccctatcgtcccggcggcgcactacacctgcggcggcgtgatggtcgatcagcacggccgcaccgatctcgacgggctgtacgccatcggtgaggtcagctacaccggcctgcacggcgccaatcgcatggcgtcgaattcgctgctggagtgcctggtttacggttggtcggcggcggaagacattctgcagcgcctgccgttcatccagcaggccaaacaggtgccgcactgggatgaaagccgggtggacgatgcggacgaacgggtggtgatccagcacaactggcacgagctgcggctgttcatgtgggattacgtcggcatcgtgcgcaccaccaagcgccttgagcgcgccctgcgccgcatcaatacgctgcaggcggaaatcgacgagtactacgctcacttccgcatctccaacaacctgctggagctgcgcaatctggtgcaggtggccgagcttatcgtgcgcagcgccatggcgcgcaaagagagccgcggcctgcactacacgctggactacccggatttgctgccggaagcgctgccgaccattttgcagccttaaactctgcaacagggcgccttatcggcgcccttttcctttcagtagaacaggtagaagtcggcgatcaaccggcggaaatcgtcggtatagctgccgtcggcctgtttgatcgccagcgcctgctcccgcagcggcgtttccttacgcgtcagcgccagcaacacccggtgccgcggcgtatcggcccgatcgctgacgttcactttcgccgccgtgtgccaaccgctttgctgcgccaggcgttcaaattcggcgccgatgtcgtgcggcagcaccacgcaaaacgttccttgctccaccagcagctgcgccgcacaggccaacagcgcgtcgtgcgttaaggtttcggtgtagcgcgcgttgtggcgcgcctgatcgcggcaggccaccgccggctcaaaataaggcggattgctgacgatcagatcatactcagcggcatgctgctgcgcataatgatgaatatcctgcgcatgcacgctgatgcgctgcggccacggcgattccgccgcgttttcgcgcgcctggccggcggcggcttcgtccagttccaccgcgtcgacggtcacctcgtcgccgctgcgctgcgccagcatcagcgcgatcagcccgctgccgctgccgatgtccagcacccggcgcgcctgccccaccggcgcccaggcgccgagcaacaccccgtcggtgcccactttcatggcgcaacgatcgtgggcgacaaagaattgtttaaaggtaaaccccccgcgacgcggggtaaaatcggctttcgatcgcttgctcacactcaccacctggctataaaactggcgtagcataaggcaatctgatcggcgggaaaagagcggctttccgcttaaataggtgaagatcgcggccaacccgtctataatcggcgccccaagtagaggtagaccatgacagcaaccactttttccgaactcgaactcgatgatcgcctgatcgacgcgctgcgcgacaaaggctacgatcgccccactgccattcaggccgctgcgatcccgccggcgatggacgggcgcgacgtcttaggttcggctccgaccggcaccggcaaaaccgccgccttcctgctgcccgtgttgcagcacctgctggactttccacgcaagaaatccggcccgccgcgcgtgctgatcctgacgccaacgcgtgaactggcgatgcaggtcgccgaccaggcgcgtgaattggctgctcatacctcgctggatatcgccaccatcaccggcggcgtcgcttacatgaaccacgcggaagtgttcagcgaaaaccaggacgtggtggtcgccaccaccggccgtttgctgcaatacattaaagaagagaacttcgactgccgcgcggtggaaaccctgatcctcgacgaagccgaccgcatgcttgacatgggcttcgcgcaggacatcgaaaccatctccgccgaaacccgctggcgcaaccaaacgctgctgttctccgccacgctggaaggcgaagcgatccgcgaattcgccgagcgcatcctgaaagagccggtggaagtggaagccgacccgtcgcgccgcgaacgcaaaaaaatcctgcagtggtactaccgcgccgatgacgtgcagcacaaaaccgcgctgctgatccacctgctgaaacagccggacgtgcaaaaatcggtgatcttcgtgcgcaagcgcgagcgcgtgcacgagctggccacctggctgcgcgaagcgggcatcaatacctgctatctcgaaggcgaaatggtgcaggccaaacgcaacgaagcggtcaaacgcatgatggatggccgggttaacgtgctggtggccaccgacgttgccgcgcgcggcctggatatcctcgatatcacccacgtattcaacttcgacatgccgcgcacggcggatacctacctgcaccgcatcggccgtaccggccgcgccgggcgcaaaggcaccgccatttcactggtggaagcgcacgaccatctgctgctgggcaaagtgggccgttacctgaacgagccgctgaaagcgcgcgtgatcgacgaactgcggccgaaaaccaaggtgccaaacgagaagagcaacggtaaaccgtcgaagaaagtgctggccaaacgcgcggaagaaaaagcgaaaagcaaagaaaaagccaacaaggtgaaagtgcgccatcgcgacgccaaaaacgtcggcaaacgccgtcaggcgaaggccaaaccggccggcgacgcgcaataaccgccactgttcaagaaaaaaccgcctgtgcaggcggtttttttatgggcgtttactgctgcgcgtaatgcgtggccaggcggtgcccctgcagccatttatccagctcgcggaactgcgccttcagctcgtcattctgcaaatgcgccggcgtttgcgagaaataaaactggaacgcaaaaccctgctgattgcgcgcccgggcatcggccccggcctgcaacagcaacagcgccagatgcggcgcattaatcttcgccgccagatgcagcggggtatcccccagccgatcgctcagggtggtgtccgccccggccgccagcagcagccgcagctgctcctcacgcccggccagcaccgccgccgcaagcggtgtggcgccggtaacggcattgcgcacgttcacctgcttaaccttggccagcagcaaccgcaggtactgcgcatcgtgcaatatcgctgcggtgtgcagcgcactgttgccgtccagccccgccgccgccgcatcggcgccgagatccagcaacgcctgcacgctggccggctgctgagaaagcaccgcccactgcaacagcgtgacctgccgatcgccccgttcgcgcaaacgatcctgcgtagcctgcgcatggatgccctgcgtatcgccgcgcgccaccgcctgagccagcgccagattgctgcggccgtcaaacggtgaaatctcctgccccatctgttgctccttagccatcatcagtaaaccggtcaccgcgaccagcgccagtaaggctatcgccagcgcccgccgcaagcgacgcccttcaggcattggccttcgcctcccacggcttttgttccgccatcgagcttatcaccttgtcgatgccgtgcgccgtcaggctgcgatcgagatgtttgctcggccgccagtcatcgataccggtcagggtatcgctgttggccaaggtgatgttgtggccaatggcgtccgggatcagcgaagtcgactcctgggtgctggtcagcatgtcatattgctcgctgtaacgacggatgccgccggcttcggcatctttcttcgccgccgtcggatcgatacccaggcgattcagggtgtaatccgacaccgcggccgcattgaaggtgaccgcgacggtgccggtcgccagcgccgccgtagccgccagaccgccgccgagcgaatggccggcgatcaccagcgcatcgccgaaggccgccttggcgcttttggcggcggcaactgcctgattgtactgcacatcatcataacccgtcgcctgccgcacgttgctcagccagtcgcgccagtcgttggtgccggcgaacgccaacacatactgcttgtcgttgctgtaaaccccggcctggaaaccgctgcccgcgtcgtgcaggctggcgggatcgatgccgaaaccgagcagtgcgttgtcgctcagacggttgaacccggcagcgccctggccgttcagcgagtaaacgtccttggccaacagcgccaacgcataatcgccctcttgcgattgttgtccccgggtcacgcccggcgcaaccgccgtcggcgccgccgcggagatatcgccaaccagcgtattcaacaggttctgcgcgttcagcgtgtactgagagggggtggccaccggcgcgggacttgccggcgcggctgcgggctgcgccgccggtgccgtctcggcgatggcgcgaggtgtagggatcgcggccaccggggatactgcagaggtaaaacttaaaggcatactcatgccgactccttgtcgatagactttttattgagcacctgaataggtactgaattagctatcggcaggtcggatgagttctgtatcaggaatgcttaactttgtgcaaattgtgatccacgtttggttttcggccgccaaacgcaaaaagggagccgaagctccctgattgactgcgccgccgattacaggctttcggtaaaggtgcgggcgataacgtcgcgctgctgttccggcgtcagggaattgaaacgcaccgcatagccggacacgcggatggtcagctgcgggtatttttccggatgcttgaccgcgtcttccagggtttcacggcgcagcacgttgacgttcaggtgctgaccgccttccacacgcacggtcggctgcatttccagcggcacttcacggtattcgatctggcccaggtcgctgaccgcgacaacctgatcttccgcgtagttggccttggcgcacacgcagcgagcttccgctttttcatcgtccagcagccagaaagaattcaccagcgcctggtcgttcgctttggtaatttgaataccggtaatcattatgttgcctccgtacaagggcgtaaaaattcacatcgtgagaaaacccaatcctggtttcggccatttggtaaaaccattgttgtcttgttgttctgtataccagcctgaccgggccagttctttgattaaagtcaatttttgccgggtaggcacagggcgtgaaggggcaaatttatgttttatatcaattttcccgtcgcgctaaaaaacaattatttttgtaaattttcaaaaataattgcattgcaaacggcggcgagaaatgaaaagcgggtttcgctgcgcgggccgacacggtaagctatagaccatgaattgctaaagaaaacaaaggagagcgtttatggccacctccctcacctggcatgacgtgatcggcaaagagaaagagcagccctattttgttgaaacgctcgcctttgttgccgctgagcgccaggccggtaagaccatttatccaccgcagaaagacgtgtttaacgcgttccgctttaccgagctggcggacgtcaaagtcgtcatcctcggccaggatccctaccacggccccaatcaggcgcacggtctctctttctcggtgcgccccggcgtgccggcgccgccgtcgctggtgaacatgtataaagagctggcaaccgacattcccggtttcgaacgcccggatcacggctacctgcaaagctgggccgaacagggggtactgctgctcaacaccgtgctgacggtggaaggcggccgcgcgcactcgcacgccaatttgggctgggaaacctttaccgataaagtgatcgccgccctgaacgagaaccgcgaaggcgtggtgttcctgctgtggggctcgcacgcgcagaagaaaggcaactttatcgaccgcaaccgccaccatgtgctgaaagcgccacacccatcgccgctttccgcccaccgcggtttcctcggctgccgccacttctcgcaggccaatcagctgctggagcagcaagggctcacgccgatcgactggatgccgcgtctgccgcaggcgtagcccagagacaaaaaaggcaccctcgggtgcctttctttatgccgttgccggggcgattacgccttggctttggagaccgcgaccatcgccggacgcagcaggcggccgttcagcgtatagcctttctgcatcaccatcatcacgtggttcggctggtgatcggtagattccatcatgctcatcgcctgatgcacttccgggttgaacggcacgttgacgtcgccgacgatttcgatgccgtacttgcgcaccacgtccagcagcgatttcagcgtcagctcgatgccttcgatcatcgcggccagttccggattgtttttatccgccagatccagcgcgcgctccaggttgtcgatcaccggcagcagatcgccggagaatttctccaaggcgaacttgtgcgctttctcgacgtccagttcggcgcggcgacggatgttctccgcttccgctttggcgcgcagcaggctgtcgcgctcgtgctgctgagcttccgccagttgggcttccagttcggcgatacgcgcatcgcgcagatcgacgccttccgccgcttccggcagcgtatcctcgtgatgagcgtgttgttccatttcttccgagacttgctcgtttggcgtcttctgttctttactactcatgaatatctccgcgttttagcattaatctcgcaacttggcttattatggggatcaaaaccggggtttcaagtcaaccggtcacaatgtggggcataaacggatcccggtgaggaaaatcacagcaaatgaataaaaaattcacctgtattggcattgttggccacccgcgtcacccttcagcgctggcaacccacgagatgctgttccactggctggtcgcccgcggctattcggtgatggtcgaacggcaaatcgcccatgatttggggctgaaagacgccgtgaccggcagcctggcggatatcggccagcgggccgacctggcggtggtggtcggcggcgacggtaacatgctcggcgccgcgcgcgtgctggcgcgctacgacatcaaggtgatcggagtcaaccgcggcaacctcggcttcctcaccgatctcgatcccgacaacgccctgcagcagctggcggacgtgctggaaggcgagtacattgacgaacagcgtttcctgttggaaaccatcgtgcataaagagcaccagcagtgccgcatcagcaccgccatcaacgaagtggtgctgcaccccggcaaagtggcgcacatgatcgaattcgaggtgtacatcgacgatcgcttcgccttctcgcagcgctccgacggcctgatcatcgccaccccgaccggctccaccgcctactcgctctccgccggcgggccgatcctcaccccgtcgctggaggcgatcgcgctggtgccgatgttcccgcacaccctttccgcccggccgctggtgatcaacggcgacagcaccatccgcctgaaattctcgcagatcggcagcgatctggagatcagctgcgacagccagatcgcgctgccgatccaggaaggcgaagaagtgctgatccgccgcagcgatttccacctgaatctgatccatccgaaggactacagctatttcaacacgttaagcaccaagttgggctggtcgaaaaaattgttctaaaatctgcgccggccactttactgtatataaaaccagtttatactgtatgaaactacagttatgtgtttatacacaggaaggttcccatgctggcgcaattaaccatcagcaactttgctatcgttcgtgagttggaaatcgattttcaaccgggcatgacggcgatcaccggtgaaaccggcgccggcaaatccatcgctatcgatgcgctggggctgtgcctcggcaaccgcgccgacggcaacgtggtgcgcctgggagccgcccgcgccgatatctgcgcccgcttctcgctggcggacaccccgtccgcgcgcgaatggctggagcagaaccagctggacgacagcaacgaatgcctgctgcggcgggtgatcaacgccgacggccgttcgcgcggctttatcaacggcaccgccgtgccgctgtcgcagctgcgcgagctggggcaacgcctgattcaaatccacggtcaacacgcccatcagttgctgctcaagccggagcaccaaaaagcgctgctcgacgcctacgccgacgaacccgccctgctggcggcgatgagccagacctaccaacgctggcaccagagctgccgcgagctggcgcaccatcagcagcagtccatcgagcgcgaagcgcgcaagcagctgctgcaataccaattgaaagagctgaacgaattcgcgccgcaggccggcgaattcgagcagaccgacgccgagtacaagcgcctggccaacagcggccagctgctgaccctcagccagcagacgctgcagctgctggccgacagcgacgagaacaacatgctcagccagctttacagcgccaaacacctgctgcttgagctggccgggttggacgataagctcagcggcctgctggacatgctggaagaggcctctatccagatcagcgaagccagcgacgagctgcgccattacgccgatcgcatggatctcgatcccaaccgcctgcacgagctggaacaacgcctgtcgcgccaaatcagcctggcgcgcaaacatcaggtcgcgccggaggagctgccgcagctgcatcagcagttgctggatgaacaacagctgctgtctcagcaggaaagcgaccatgaacacctgaacgaggcggtcaccctgcatcaccagcaggcgctggcgctggcggaagagctgcaccagaaacgcctgcactacgccgccgagctgaccacgctcattaccgacagcatgcaggcgctctccatgccgcacggcaaattcaacatcgacgtgcgcttcgaaccgcagcatctgagcgccgaaggggccagccgtaccgagttctgcgtctccaccaacccggggcaaccgctgcaaccgctggcgaaggtcgcctccggcggcgagctgtcgcgcatcgcgctggccattcaggtgatcaccgcccgcaagatggaaaccccggcgctgatcttcgatgaggtggacgtgggcatcagcggcccgaccgccgccatcgtcggccgcctgctgcgccagctcggcgaatccacccaggtgatgtgcgtcacccacctgccgcaggtggccggatgcgggcatcagcacctgttcgtcagcaagcagaccgacggcacggttaccgaaacccagatggcgccgctggataaacgcgcccggctgcaggagctggcgcgcctgctcggcggcagcgaagtcacccgcaatacgctggccaacgccaaagaactgctggccgcataaaaaagctcaactttttcactttcctgcggtctgacagtgacgctgttggcccgagaaatatctaaagtgcggcgcggcggtgatccaaagccatctcaacggcctgaaaaaggccaagcgcttgaggtgctaaaggaaagccaatgcgtcgcaacgtgaaagatgaagggtataaaggtttccaactgccgcaaggtctattatcatcggcatcctatgccctaaaggaatgtgattactatgcgctgtaaaacgctgactgccgccgctgtagttcttgtgatgctgactgcaggctgttctacttttgaaaaggtggtttatcgtcctgacatcaaccaggggaactacctgacgtcgaccgacgtggcgaaaatccagaaagggatgacccaacaacaggtcgcttacacattgggtaccccaatgctgcaagacccgttcggaacgcaaacgtggttctatgtgttccgccagcagcctggccatgaagacatcacccagcagacgctgacgctgaccttcgacagcgcaggcgtgttgaccgacatccagaacaaaccggcgctgaccaagtaatcggtgccgcccgctcttccggcccatgagggggcatgatgttcctcatgacagtcgcaggctgcaacgcggaagaaaaagtcagcttcagataaaaaaataaggcgctataagcgccttatttttttgccttttctgcccgttgccggcgcagctctttcggatcggctatcaagggccggtagatctccacccggtcgccgtcgttcagcgtatcgcccagcttggccgggcggctgtagatgccgattttgttgctcttgagatcgatatcctggcgcagctccagcaggcccgaagcctggatcgcctgctcgacgctgctgccctcggccagcttcaccttgcgcaggtactgccgctccggcaaggcgtacaccacctcgacctggatgtcagacactgtagacctctttcgcccgctgggtgaatgcctgcaccatgctgcccgccagctctttgaacaccttgccgaacgccagctcaatcagtttgttggtgaactcgaagtccaggtgcagctccaccttgcaggcctcttcgctcagcggcgtgaactgccagccgcccatcagcttgcggaacgggccatcaaccagctgcatattgatgctctggttatccagcagcgtattgcgcgtggtgaaggtcttgctgataccggccttggcgacgtccaccgcggcggtcatctcgttggaggtagcgttaagcacccggctgccggtgcagcctggcagaaaatcgggataagaatgaacatcgttaaccaactgatacatctgctcggcgctgaacggcactaatgcagaccgactgatctggggcatatcatttcctgtaagacataaaacgtacagataataccatttatctggcggcaaacaaaaaatctgctaagggatgagggaaccaaaaatgcgaaaaattgcgcaggtgctgaacgggaaaggatttctttcgctgaagcatccagtataatgaacgcactatgacaaagaaaaaagcacacaaacccggttccgccaccattgcccaaaacaagcgcgcacgtttcgaatacttcattgaagaagagttcgaggcgggcctgtcgctgcaagggtgggaagttaaatcgctgcgtgcaggcaaagccaacctcagcgacagctacgtgacgttccgtgacggtgaagcctacctgtttggcgccaccatcaccccgctcaacgtggcttcgtcgcatgtggtgtgcgatccgacgcgtacccgtaaactgctgctgaaccgacgcgagctggacaccctgctcggccgcgtcaaccgcgaaggttacaccgtggtggccttgtccctgtattggaaaaatgcctggagcaagatcaagatcggcgtagccaaaggcaagaaagagcacgacaaacgcgatgacatcaaagatcgcgaatggcagacggcgaaagcccgtatcatgaagcacgccaatcgttaagccgctggcttatcgaggtaaacttctggtatactgcacaaagttacttggggctgattctggattcgacgggatttgcgaagccctaggagcatgccgaggggcggttggcctcgtaaaaagccgcaaaaaaatagtcgcaaacgacgaaaactacgctttagcagcttaataccctgcttagagccctctctccctagcctccgctcttaggacggggatcaagagaggtcaaacccaaaagagatcgcgtggacgtcctgcctggggccgaagcgttaaactcaatcaggctagtctgtcagtagcgtgtccatccgcagctggccggcgaatgtaaagattggactaagcatgtagtgccgacggtgtagtaatttcggacgcgggttcaactcccgccagctccaccaaatacgtcgccagtgaaccagatagacccggcgataatagcgaaaaagcccacaacttcggttgcgggcttttttgtttttgtcgtattccgaaggctcgccccttggcccgggctgttccgggccaatgcgggctagtgatccagatagaggtaatgcagccagctggtcatgcgcagcagcactttgcgcatcacggagacgtgctcgaagtgcccggtatagaccgccgcctgggcgctcacgccgtcgggcagatgatccagatccgggttggctgccagatcgatcattacgtacaccccttcccggcccggcgtggcgctcaggccctgcagtgcgccactggcctggtagctgccgtccggtatcgccggtagcacccggctcacggtgccgccataaacctgtcccggcaagccgttgaacaccacttcagcctgatccccctgcgccaagcgcaggatggcgttctggcggaataccgccaccacctggcgcttttgctgcgggataaagatcatcaccggtttgaacggcaagcgaaccgccgccgtgcccggccgcgccagcacctgcgtgacataaccgtcgctcggcgcacgcaccaccgtttgttccaggttgtaacgcgcttcagctatttgcgatttcaggctggctatcgtggcgtcttcgccgtcatagcgcccggacaaccgagcctgttcctgttggaactgggctttcgccgcctgcagtgcggcggattgcgcctggtactgttgctgcgcatggctgacgtcctgctccgaaaacggattgactggcatggccgcccctttcgcgtagcgctggtaatccttacgggcacgctcgtattccgcgttcgcccgctgcacgttggcggcggactcgctaagcgccgcccggcgcgttctgatctccgcctccgccccggccagatccgcctccagcctggtgagccgcgcgtggtaacggctgtcgtcgagacggaacagcacctcgcccttgcgcagcagcacgttggttttctccgtcacttcaacgatcatgcccgagacctgcggcaccatcggcaccgacacggcaattttctgcgcccgatcgctgtacggatggttgtagttcatcgtcagaatcaacgcaccgacgataacgatcccgccgagtacggcggtcggcacggtccatttgttgaccggaatgcggaacagtttaaatacgccgtagctcagcgccacgtagctgagaataatgagcaaatccataggctacgctcaacttaccgtggggccgggaaccgccgtcggcttttcctgcaggcgttgtaattcggtttcgagcagtgcgatgcgcgcctgcagatccgttgaggattccgttctttcactcatgccccagccgcgttccggccgatagagcgtcgcccagatccacagcagtggccaaatggcgtgtagcgtaaacaggctgacccaaccggcaacgtgaatcgcatcctgatgcgggtgccggcgctttttcgccagcaaataaggaatgtcatgaataataatgacgccgtagaataatatcaggaataccgcaatcagtacgcctaaagcaaaatagttaagaaacatgtaaagtcctggttgagaataatggaaataaataatctctatagcgtgttatattgtctgatgtcgttggcgatggtatcgatggcgttcttcacgtcggtgactttcagctgtgctttctcattattaagattttctcccgaagccttacgtaccactttaatcactggctgattggtcgcggcatcgataaactcgccttccatatagaccgcgctctccatagtacggtgcccggttacgctttgcgtcgcggcgatcagcagcgtgattggcaagacttcatagacctgcagccctttcttctgcgtgtcgatcgctgtgatggcgccgcggaaaatcagggtatgctcgcgcggcatgtccaccagcgtaaagtgggtgcccatcgcctgcttaaactgctggttggtgtaattcaggatattgtcgagcgcgcgttgactcaccatttcgctcggtttcggccgcgggaaatagatcatcggttgataaaccaaatattgataacgggaaaaatcgacgctctgatctttccaatataaaacgtctttgccggacgcggattgacctttattgatatcgtcataattggtcagaaaggtcgagtatttttctttttcggtcacggcggacgagcacgcggccagtaataacagcgcaggtaaaataaccgctcttgtcactttcattgacggatttctctttatttttgtggatagcaaataatcaaatcgaatgatacccacccacccgtgataagtcatatgacaatgccgccaaaggtgtatatcatttttgatatacaaactcatgcgagccggccagtgaaagagaaagacttccgcattgaagaactcaggattgtccgcgtcattgccgaaacggcgagcgtcagcaaagcggcacagctgttggatatgccgcagtctaacgtgtcgcgcgccctcaccgcgctggagcgacggctcgggctggaactgttcctgcgcagcccgcgtgcgctggcgctgaccgagttcggcgaacaattcttgcgccgcgccgcactgctgctggacgagcatagcgatctgctcgatatgtccggcacctataagcgcagcctgagcggcatggtcacgctcggcgcgccgatcggtatccacgcgttcctggccagctatttgctgccgccggtgctgcatgccgcaccggaactgacggtcgatctggtgacccgcaatcccgatgaacgcgaaaaaaagtatggtgcggtgttcgacagcgactgcgatttgctgatcagcttcttccagccgcaaaacgaaagcctgatcgccaggccctttacccgttttcgcgtcgggctgttcgccgcgccggattacatcgcccgctcgccgctgaatgagctggatgaactgtcgcagcatcgctgcattaccttgcgcatgctgggcggcattcgcaatacctggagcggctacagtgcgcagggggagttggtgcaggtcgagatcaacggcgccagcgtctgtgataacattctgccggcgatcgagctggccaaacagggcctgggcatcgtctacgccccatattattccgtcgccgccgagctcgatgccggcactcttctgccctgcctggcgcgcgagcgcggcatcgatatgcaggcctacctgatctaccgccggcgcggcgtgttgccgcaccgcgtgcaggtgacgatggacagcatcatggaaagcgtcaaactgcacgcacaccggctgatatagccaaaaaaaaaccccgccacagcggggtttaacgcatcacatcagcgcaaaatacctcaccgcccctctttttcccccaggaagaaataccacagcggaatggaaagcagcagggtgaacaccagcgtatacagcagcaccatcaggctctgcatgatcaccatctgggcgctccaggcgccgatcggcagctgaaactgctcgacggtgccgccgaggatcgcccggcccatcacgcaaccaaccaccaccgcgaccgtcgcccccgccgcgcggaacttgcgcccctcggcgcggcgggcggccgcttctggcgtttcatcccgcaagccttgccgctggccgcgccagcgccatacgtccaccagcaacaacgccgcgaggctcacgcccatcaccggcagacaataacccagcgccgctgccaccagcagcgtaacggcgcgcgccggcagggaaagcgccagccaggcggcaatcagcgtatgcaccggatgctgcgcccccgccgccgggcggcggatccaccacatgcggtaacccagcgcaatcatcaggcacagcccgaggccgaacgccgccagcagcagctgattcggcaagccgaacagaatgcccatgtgggcgtcgatgccccaacgggtcagcttggcgatgagcgggaaggtgtcgaaccgcacctggtcgacgacggcgaagctctgcggcgcgatggcgaccgcgtccacctgcgttggccagctgcgatccacttcggtcaccgtccaggctttgccctcgcctttcggctggcgcagctctatcttggcggcatcgatcccggcggcgcgcgcggcatgcagcgcccgatcccaatcaccgttcagcgcattggcctgtgcggcagggttcatcttcatgccaggcatcatcccgcggtgctcggcgtgcggatcggccggcgtctgcggcgcatcggcctgcaggctggcgttgacctgcggcgttagccagcccaggttggcccgcagcgcgtcgatgttgccgccggcccactgcgaccaggtcagcccggtggccgagaagaacagcagcccggccagcagcgctacgcccagcgtgatatgccactgccgattggcggcgaaacgcccttttgcctttttcagcttgcgcttcggccgcgtcgccagccacagcgccacgccgcccagcgcggccacccacagccaggaagccgccagctcgctgtagttgcggcccagatcgccaagcagcaggctgctgtgcagcttgtccagccaggtgcgcagcggcagtacgccggaggtgccgtacaccgtcatgtcgcccttgatcgccaacgtgtaaggatcgacaaacagcgcgcgcgactcggaagcgcccagatcggcactcacgaactgcacgcgagtggtgtccgttgcgctgggcgccgggcgcacggcgtaaatgcgcgcctcggcacccgcctcacggcgggcagccgcgatctgatcagccagcgatctcgcctgcccgtgcggttcggtgaaaagcgcatcgcgatactgcgcctcttcaagctgcggggtcagcacatacagcgtgccggtcagtgcggcgacaaaaataaaaggggcaaccagcaggccgatatagaaatgcagccgtctgatcaggttcagcatcgcgccacgcggcgatgcggcaggtggagttttggttattgaagacatggcctttctcgtttttcaaactgtgcgcgcaggcaaaccgtccgcagcgatacgaacggcgttacccatgatcaagcattagggaaaaacggctggccgggcggcccgcgcgggctcggccgcagagtaaggcgccgaaggggcggggggacgatgcgcggcgcgcaaggcaggcgcgcgatgcgcgtcatcagccacagcagcgggacgaatgcccacagcagcagcggcacgtggatcagcagctcgcaatagccgcagaagatcatctctgccggatccatgccatggtggccggcatgttcggcggcgggcatcaccattccgtgcatctcatgctgcatggtagctgccggctgcgccatgccgctcatcatctgatggtgcatcagcgatttcgacaccaccggcgcaacaaacagcaacagcaccgccataatggcgatgcaggcggcaaagcgttgctgtagctggcgtggcactctcatcgcagcggtgaattaacccggtcggttgcgaacaagcggccagtgtaacctcaatgaacggtgaggtgaatgaaaagcgaaacgtgtgggatcagggagatctcccgctaacgatttgatatccgctataggctctcgacacgacgagggattgccggccgacgcttctttcttgctgccctcccaatcatgccctgggtgtttatattgagcctctttttattaactgttttatagtgcatatagaatgaaaacaaactcagcaacaacagcaataacgccaaaaacaataaaatcatcaatgcaccttgtattcaaaaatccatttacagctcattgccacgcaaaatcagccagttatagagttcaatttttcggttaaaaccgaattttttcatcacggccccacggtgggaactgacggttttaatgctgatattcagccgcattgaaatttctgccggcgtgagaccttcggccaacagacgcatgatttgttgctgacggtgggtcaaatcatcttcaggcgagttaacccggcgctgataaccaaaattctctcgctcacgccataaggtatccaggtagaaacgcagctgctgtaaactttctttttttaacaatgcctgctggaggcgtgccagtcgccatgtcgcaaggctgtttccccccccacccagtgaaaaaagaatggtatttttggtcgatgaccgtaaagccttaccaataaagtaggccatgtagttactcgactcataaaatataacatcagcgatctctagcctgtccttattgacaaaaatcacgttattatttttttcatcaaagtattcctttaagaaaaacatcaatccctggatgaaaaaacagtccccatccaacaaaccgatatagatctgcgacctcatatataccaccttacatccagcttcagaataattcatcctcaattcacatgaacatcactcgcctttcccaggtattcgggcagatgggggcgcgttattcctgacggaataaacatcttatattaaagaacgatacccgatgaaataacaaccaattaaacgaactcaaagtatctccagagttaatactgccgaagcactatagttaccaccgggtatgtcaccattcttttgaagctcggaagaaatcgtaacgttcttaccatcactcccgacatcatttatcgtcacccctgaacctgcaggggagttgtttatttttaattttgaatataggtttttggcactactcaaaaccaagcgccctgatgcatccaacccggaaacggctaatttcatgctattcttccgggtgcaggagacgctgaagttgctctctttataattgccatcaacattctcctgacttaacgcgggatgctgtataataatgttttgattatttatctgacaactaacaggttcaatcggcggctctactgagccgctgctcccccctccctgagcactagaacaggtgcccccaaaagatgcaaaatagggtgtcaaaccggtaacaccatcactataatttccccaggttcgtatccagacacatactggctcaccgcctgataaccaatagtctcttgattcacatgctgtcattagcttactgtcgatctgcgatgccataaaatcaagcgtagttcccttattaacatccacagtagccgagcaataggttgactgatagccgcttacttctatcatccaataagctgtgcacgtagtaagccctgctccttcagatggatagcacttaaaatttttctgcgcagaatacttatctttaacagtccctgtcggtgatatagataacacagatgccccatttgcttttttcacccacttctcatttaaagttaccgcaccagaagcatagaaagccgtaaaagaaaagatgaagaccatgcatcttatcattattatcaccctcagttataatccactcataacaccagaaagttcactaaactaaataataaacacatccaaactcatagccgcttatttaagcccctactcatattccagcctaaacgtcgccaccgcaccaaacgccccgcgcccaatcgtttttctctcgatcgcctgcggttcgccgcgcacataggcctgcaacgcgacgctattgccgccggcccgcaaactgtatttatcgctggttttattcatcggcagcgctttcccttccggcgtctccagcccgatagcaatccccttcgcctggctgtcggcgttaatcgccagcaggccgggcagcgccagactttccgttcccagcaacgttatcgccaccgttttccccaggctgacatcgcattccgtcaggtgaatttcaaacgtctgccccagcgtgcgggtattgaggtacaggtatttgtcgatgatggtgccgaaatccagtgcgatttcctcatcgcccggcgcgatcacgcacggctccgccaccagcgcgccatgcaggcgcaggttattcgccgccgccaaggccgcgccagcgttcaacactaaaaccgtggccagcaagtatgtgccaataatctttttcatcgctaacccttcctactgataatcggcctgcaacgtcgcccaggcctcgaatgccccctcgctcagcgtgactccttgtttttgtaccggcaccgcctccagctgcggtgggttatccaaggtgatgttcaacgtgctgcccggcgtgaaaggctcatcgtcccggtatatgcggatgcccaaatcgcttttgttggtcgccaacgcctgtttatcgaagccgctgacgccgcccttcagacttagggttagcgcccaattgccgttggtcgctctgtcgcaggcaatttggtagttcagcacctggcggtagttaaccccgtccaccttgttaatgccgacgcgctgaccgaagtccacatcaacctggctgccgtcattaatgcggcacggcggcggcgtaagcagtgtgccgcggaaagtcatattctccgccgctagcgcggtattcagcggccctataaggccgcctgtcaacaacagggctcgcatcgttttattcattttccgttcccttactggtaagccaccttcagcgtggcgcccgcggtaaactcaccgccgctgagcgtagtaccgctctgtttaatcggcaccgcccatagttccggtgcattcgggtaggtgaaattcagccagctattgagcgccagcttactgctgccttgctgtaattggatgcccagcgctgttttattggttttcaatgccgtcgagtcaaaggccgcaccggtgccctgcacctgtaacttcatggcatttttactttggccgctgcaggacagggtgtaacccaccgccgtccgataatttttgccgtctacccgagtggtcatgacttcgccaaaattcacctcgatcggccggtcgccgttaatcacgcagggcggcggcgccaccaccgtaactcttacggtcaccgtggtcgccgcctctagcatcagcggcacggtaatcaacaatgcgctcaggcagccgattcgctgtcggttccttactctcgttgtcgtttcatccatgttcagctccgcctcagtcatagctcagataaaagtccatcaccgcctggtagctgcccgccagcaaaccggccgccgtgcgttccggcgtgatggtgtagctcaggctgttccgccccggcgttaacagcagcggcgcacctctttcgcccagccgcacatcgcgcccgtgggcatcctttagccgcagccccaggccggatacgccgcgcgcctgcaccagctgcgggttattcgcatcacgcggcgcccggaaactcaccgtcaccgccggctggtcattggcccagaccaccccgccggtgcgcaggtcacggctgcccgccgggctgcgcaggcaatccgtcagccgcagttcaaagcgcaccggcgtgccgcgatcgcctgtctgcttcaatcgcccggtgccgacttcacccaacgcgatgtcctggcgcatgctgtccatctccagccgacaggcgctctcggtcagcgcgccctgcacatacagcacgccgttggcaccctctacctgccagttatccgccgcctgcgccggtggcaacagccacagcagcgcggtcaggctcaatggcgccatcaaggccaatgccgccagcacggcgtaatatcgcagctcgcttatccagtaagcgcgttccgccatcagctcctttgccatttatcctcctgtctacttttatctggttgcagcggttaatcgcctttcttctccggcaccaccttgcagatattgccgctgcagctgaagctcagctgcgggcgaccgccgtagtcgttaacgtaggtcagcaccgggctgttgcccaccaccgccgcgctcgccgtcagtggcaggctgcccttcggcggcaccatcatcggttcgaaagctttcaccggcgcgctcttgctgctgcccgcatccaccagggtgacgtagtacggcgtcgggttgttcaccacgtatttgtcgccctgccgggacagcgtcagctgttcctgcggcggcggcgcgttggtgtcgatgcccagccccgccgggcggtagaacagcttgatgcgcgtctgcagcgcgatctgcagggtgttcggtttgttgctcttcggcgggatctcgcgcagattgaagtagtagaccgtttcgcggtcctgcggcagctgtttggccgccggcagcgcctggattttcacctggctcggcttgcccggctcgatgcgctgcaccggcggcagcaccgtcagcgggctctggatcttgttaccctgctcgtcttcaatccagccctgcgccagatacggcaactgcttgttctggttgctgacactcaggctcaccgagttcagcgaaccgtcaaacaccacgcgggtgcgatccagggcaattgccgcctgggcaggcagcgacgcagatacgatcagcacggcccccgctgccgccacaatgtgtttttcggcaaacgccgcaaataaacgtttcgtatttttcataacaacctcaactcaataaatataaaagttcatccaatcaataaaagttcatttagataacattaaaaataatcactgcactgccggtaaagtcgcccgaggtttcttttttcagttccgactcatcgagagaggcaaacagctcgacgctacccttataaccgaccttgacggtcacatctcgtttgttgctgtcgcccggtgcatcaacggacagtttcactttgagctgctgtttattttgtggattggtcaacacgatggtgtcgccgccgctgcgattggcatcggtaaatattaagcgcgccgtcgcttgtgaggtgtaatcaccatcgcaaaccaacgatgccgtaatgctggcggttttagattcctggttgacaacgccaaaatcaatctcactgttacttaaaccatcgacccggcaaaatacgttgacggggggtagcggatctagcggttgtaaaccattatcagtcgatgcaaccaccagcgaaactggatcaaatttaaaataaacccaaacctttggtttgcaccccttctccgagaaatttttatttattaccccatgaacgggtagtgctttttttattctggcattgatatcatcaaagggataccattgcccattccacgtatcaatgactacaacctccatctcccgagcaaccggatttattacgcacctttgtccatcgtgattactccagaccgaaatagtacacctaccaccacaacgcaccccccaatcctccctaatgtaatcattgatgccatgatccttagctgaaaattccagacttgagaaattataatcgatagcagcctttccatttaaccaataccaatcagaaaacctcacatccacttcaaccgcagagcaaacattaaaaatcaacaacaataaaactgaaagaatatatcgaaaaaatctatttcccatttatgtatcctttgctttgcctaattgatggcaaggcagcaacaatgtattcatcaacagcaccgtcaacgaactctggatcttgttgccctgctcgtcctccagccagccctgcgccaggtgagggagtctgctttttctggttgctgacgctcaggctcaccgagttcagagaaccgtcaaacaccacgcgggtgcgatccagggccattgccgcctgggcaggcagcgacgcagatacgatctgcacggccccctcgtatttttcataacaacctcaactcaataaatataaaaattcatccaatcaataaaagttcatttagataacattaaaaataatcactgcactgccggtaaagtcgcccgaggtttcttttttcagttccgactcatcgagagaggcaaacagttcaacgctgcccttataaccgaccttgacggtcacatctcgtttgttgctggcgcccggtgcatcaacagacagtttcactttgagctgctgtttattttgtggattggtcaatacgatggtgtcgccgccgctgcgattggcatcggtaaatattaagcgcgccgtcgcttgtgaggtgtaatcaccatcgcaaaccaacgatgccgtaatgctggcggttttagattcctggttgacaacgccaaaatcaatctcactgttacttaaaccatcgacccggcaaaatacgttgatggggggaaggggatccaatggtaaattgccatcgtcggtagaagctaatacgtggtcaactccattaaacaagcgtagccatagacgaggtttacaggagccatactcagcattaacaaccccgctgagatatggcagcagctttttaaccatggcattaaactcatcaaatggaattcggcgatcttcccttgtaatcacaaaccctctgacaagcccagttggatgtggatttataatgcaacgcttgccatcgctatttgtataaatagatatctggcatgtccattgagctgaacagaaaacctctttctccgatatgttattcgcgccattaccaatagagtcttctttcgttatctccacctttaagaaattataattcactgcaggcttgccattaagccagtaccaatctgaatagctggcttcaacgatagctgcagagcaggcattactgatgaagaataataaagttaaagtaataagccgcaattttttattcctaacttgattttttcaccgcatgccccgttttatcacagggcaacaacagcgtattcatcaacatctccgccggcagcgggctcggcaggcgcacttcacactgcgccgccccgttccagcgcaccgtcatcgcctcaccggcgttgatgccgctgagatagacgctgccgccatcgttgacgatgccggtctcctgcttgcgggcgttcagcaccgtggcgccgaacggcggttcactgccgtccgccagcttgatcaccgccatcgccttggcccccgctatcacgccaaactgccggtagccgatggccccctcggtcagcgtcgcctgcaccaccgatgtggtcgcctcagcgttgtcgcccagctggttcagatcgatgctggccttgttgcggtaatagctgttcacgtcgccgatcaccgccttgccccagacgttggtgcggctggtgcgcccgtagccgcgcaccggcacgtccgccaccccctgggtgtcgatcagcatccgcgtgccgcccgccatgccgctgcggtgcaacgccccgccctccgccgtcagcgtcatcccgccctgggcgctcagccccaccgcgctgtaacgcccttcctggtagctggcgttggcgctcagccgcgcgatatcgccctcgcggctgtaatagccgctggcgttggcgccgctgcgcgatgtgccggcactcagctggtagttgctgcgctcgtcaagccggtcgtaatagctcacccggttcgtggtatcgttgcggttcaccgtggtgttgtagctcagcgtcgagcgctcaccccacggcatcgacagcgacaagtaggccccgtcgtccttcattccgttgtactggttgcggtacgccgacagcgacaggctcaggttgcggaaccggccgatatcgaaatagcgcgacagcgtcaggttgtagcgatcgttggccggcctgtcccagtaggtctcatggctgtagttgaggtagctgctcagcccccagtcacggaagtgcttgttgaaggtaatggtgtacatctccttgccgctgccgttgcggttgccgtagtagcgcgcgtccaggtactcgctcatgctcatgaaatcctgctccgagaagcggtagccggcaaaggtcacctggctgtcgtactcgtcgaagctcttcgaatagctaagccggtacgaaccgccgctcagcgccccctcctcctgcggcaaccgcgcccgcgactgggtagcgtcgaatgacagcgccccgaacgccatcaggtcacggcccagccccagcgacagcgcgttatagtcaccgcccgccagcgcaccgccgtacagcgaccagccgttgctcaccccccaggagaactcaccggtgccgaacagcggcccgcgcgcgtggtgctcccagtccgacggcttgcccgccgccagcttgaaacgcaccgagcccggccgcgtcaggtacggaatgctggcggtgttcatcacgaactcctgcaccgtgccgtcctgctcctccacccgcacgttaagctcgccgctcaccgcgtcgttgatgtcctgaatgcggaacggcccggccgccacgctggtctcatatagcacccgcccctgctggctgatgatgactttggcgttagtcttcgccacgccgaccacctccggcgcatagccgcgcaggttgggcggcagcatgttgtcatccgacaccaggctggcgccggcaaagcggaagctgtcgaacatgccggagtccaggtagctctcgcccagcgtcagcttcgagcgcagcgccggaatggcgcggtaggcgtagtagcggctccagtccagccgcgtgtcggtcggctgcccgctgccggtctggtggctgaggctgccctgccagtcggcccgcaggcgccaggtgccaaggttggcgccggcggtgccgttgccgctcaggttgtaactgcgggtaccgctgcgctgctggtgctggctctgtgcgttgaggttatagtcgaacagcagaccaggaatgccctcgtcccagcgcgacggcgggtcccagttctcggcggtgtactcgagaaacgcctgcgggatgttcaggtacagcgacgaggtggccaggtcgccgcgcatctccatgcccgccacgctgctctcgtccaggcactcgccctggtgccaccagcgcaaatccttcatcacgccctctttaaggcccagttgcgccaccagcgccttgttgatgcaggcgcggctgccgttcgggtcgtcctgcggcggatagaacgggatttgctgctccggcaaatcgttcttgttgatgtgcaccaccatgccgtaggtgccgggcataatgtaaccgccacgtgaaaactggctcagatcgatgttcttgcggtcatgcacgtccagcacgtcggtgttgaactggatctcgtcggcagcatacacctgtgccggaagggcgccgagcgccagggcgatgcataatcccagcgtattgatacgcaccatttttcctgctggtgatttcctcatgtccccgttcccttataattatttcttgtccctgcgctcttgtaatcagtcctcaccaccggcctcagaaataatccagcttgaaacggacggccgtgaaataatcgccggccttcggcgcatgattattggcgactaatttcagggcgtaattcagccgcatatcgccgggaataatgtcaccgcgcggcagagggtggcccggcgtggcgatattgccggcggcatcggtgatttgcagcgcaatgcccgacgcctcgccgcgcacgccaaataacccctcctcggcatcgccgtcaaaggtcacctgaaactgtttccagtctggcaatttattattggcgcgttccagcgtgcaattaaccagctcgatggcgaaagtttttatttggctttgcccgtcgcgaataatgtccgctatcggcacgatatccatatccacggtctgatagcggctctcgacggcaatggcgcaggcggtgtcgataatagcgccttgcatatttaccctgccccagccctgaatagcgctgcctgcctgtgcgaaagcagtgaagataaataggcaagccgccagcggaaatagcctgattttaatccacataacgttatttcctgataaagcgtttctgaaaaatgcatgcgggcaccccgcatgcattagcatgcttaattcacttcaatattgaagaaattaacgtggcttagttatacgccagggtaaagtcggccactgactggaactcaccttcagtcagtactgcaccagaagccacatcaccctgcaggtaggccgcgaaattcagggagttagagccattttgcagctcctgcgccttggttgccttgcccagcttgatcacctggccggaaccgtcggtaatggctacgctggcgccctgcgcggtaccggtaatacccagcaggccgttattggctttggattccatgccggtaaaggtcagtgtaaccttgtttttcagagggttaccagtgaccgcatcattttcaaaggtgcaattttccagatcgatagcgaagttgcgcggcgtagatttaccgccgttcagcagcgccactttggagatctggcccagctcaacggtctgatcgatagcttccggggaaatagagcatggcgcatcaataatagaaccggtgaaagtcactttaccgtgaccctggtcagccgcaaacgcagtagaagacagaccaaaggcaagcgctgccgccatcatgatgttgttcagtttcatagttcttacattccttagtaagtagaaagagttaaataagactcactttatctgcagaagataatgcttcccggcttactgccatttccgtatcagcacaggaacccttctgtttctggccttcaaaccagtgaggacaatctactaccacagctcacttcttgaaatataaaactgcaaattaaacaaaattaagaatatatataaattaaaaaccttaaaaatagattttaactccgattaaatgcgcaaattaaccgacctgtaaataaaaaaaccgatcaattcatgtttaattaaccaattatccatgcaatataagaaaattctaattccaatagccatgagacagttgaaaaaaaacgccagcagccacagtattaagcacggacagattatttacagggagcaacatgaaatacattataaataacgccatcatttatgatgcgcataaagggacattatcactcaacaagaacaacgatgataaaaacgtggttttattaaaaccttcacagcgactgttgtcgttgtttattgagtgcaataatgaaattgtagagagggagcgtttgctggatgaggtatggaataatcatggcctgacggcatcgaacaataacctgagcaattatatttcagggttgcgcaagacgctggctcagttaggccaggatgacattctggttacttacccaaggcaagggttcaagttcgtcgccgagtcgataacccttttaggggaggaaaaggatgaaaataatggcgaaacgccgaaagcgcatccgttaacggaaaagaaaaccaggcgtataaaaccgctcattctgcttctcctgcctttggccgccggccttgtcgccatcggcgtcgcgttgcattattacactgccaataatgatctgagctttattggtaaatatcgcagctgcaacgtgttcgccatcgacagtgcgcaggatatttcttcggccagacggctgctgagcgagtttgattatgattgcaacagcagcgccagcgtatatttatacaatcaggttgccgaggacgacagcacagcggccgtgatgacctactgccccagacagggcctgtctgcgtgcaaaacggtaaagctgcaacagtaggcatagtctattctgacatcagaatagtgccccgttagggcatcaacgcttgttgcaaataaaattgggggaacgattgtcggcaaagatgtattgctgatcattgatcttctcgaccgtaaacaagatgtctttccccaccaccgggaacagcttgtcgacttctttattattgtgactatcgtcattagagcgtcgaacgatgtttgtcgggcgcatcaagaagcgcccttcattcgcggtataagtcatggtaatggtgcgcgctatggtaaaacgttcattattataggtcacgctgccgttgataataaatgcgctctcccttgcatttatattgacaatactgacaaacaacactctggataacgaatgtttttcatcatgataatcggtgcggatcaccgcattgcattccggcatgaccggagcaaaaaactgcaggtagataccaaaaaatataaagacaactccaagaatcatcagtgatgcaaacaccccttttattgtttttttattttttgaaaacatagacattctcacaggctgcgttaatgttcttttcattttttgggcaataggcgaaaaaggtcgccatcgagtgcaaggcgctgagaaccaacgcaccgccgttataataataaaccgttgccggtttattacagtcaaagccgccttcctcgagggtattctttacatcctgcgccgaaatattcgtgtgcaccagcttgtggtggctgttaattatttcgatttcacaattagcaatacgctgagcgggtatgaactgcgccgtcgggatataaacctggcgcattcccacagccaacatcaccaggccaccgataaaaacggccattgccacgcagagccataaatactccatccgccgggaattctctttcccaataagtattttactcaattcaggcttttcttggtttcctgtctcatccgtgcgggcaacccccgcctgaagcaaaatcccctgctttggcaaggtgatcaacacttcaccttctcccagttcggtaaacgccttgcgcaactgagaaagcgcattattcagattattgcccgactctatttggccatagctgccccaaacctggctcaacaaaaactcgcggcttaatactttattatcgttccgtacaaacaataacaacaatctattaaccgtcgccgttaacgagactttagattgttcatcatcaataacgcagagctcagagatatcatcccggtaaataattctgttgtttatcacataagccatagcgcacctcttattgaacgctaaaatgatatcacaacgcaatttttataggaatattcttaataaaaataattagccttttaatacatgaggttatatttgaaggttataaaaatcatattattttctctgtcagagaatctccttgggttattcgttatcacaatcctcaaccttcagcgatgaaaccctgtttttgccttttctttccaccgtaacctcaacatgttggcccggcggcgtctctgcaaagatattcaaagcttcctgggcattatcaatcactttccctgcaactttattaatgatatcgccttcctgtaagccggcgtcgctcgcagcccccgagtgttttacacctgtcaccagcacattatatcgcccccccagttttccatggatagcggagacattagcagcttccacgccgatgcagccgcgaatgactcgcccatccgccacgatttttttcattaccttattcaccaggcgcaccggcaaagcaaaactgatgccttttacgctattcagatcctgatctaccgagaaaaccgacgtattcatgccgatcatttctccagatgcattaaccagtggcccgccggagttacctttattgatcggcgcatcggtttgaataaacgtctgtctgccaatgacgccgaagccgctgcggccaatagcgctaacgataccgtgtgaaacggagccaaccagattgtaaggattaccgatggccaaaacaaaatcaccgactttaattttcttttcttcatcgatacgaatgggcgtggtcgccgcaggatccagtttcatcacggctaaatcggtcagtttgtcgtagcccacgacgatcgcttctcttaccgtcgcgtcgctgagcagcgccaccatgttcttgacgccattgaccacatgataattcgtcaccacatgcccacgattgtccataataacgccggtgcccaacgggcaaccataaacaacatcattacaatctttagaatatatatatacaacggatgggagcgcgcgttctatcgccatactcagtgacaattcattcacattttgccggttctggttagcgaattgcttaaaatagagggtgctgacgactgcgccaataaacacgccaattaacatatgaataacctttttattcatcgcaccctcaaaatggcaaatggtttttataagaacattcttcataccgaaggttaaatacactgacaagcgaaaattgacgcagtcaacggcccctggctcaaatctctgctccccctggtttgaacacctttcctccttccctgcgaacctttcaaactccccgaaaaaacaacatactgatttaattaaactttaaacccatcacacgcattatttcgttccgttcctgcataaaaaaacggcattgtatgatcgccctcacaaacatgataacattatattgttataacaaatggcgacaacaaccaaaaggaacctctggatgaactaccctcttgttggcagcgccattgttgagcacagcggcggtttaaataacttacgccatgtcaccaactgcatgacacgggttcgcatgaccctggtcgatcctgcaaaagtgaatattcaggcacttaaaggcatcgaaggcgtgctgggcgtagtggaagacgatactttgcaagtgattgtcggcccgggcaagtcgtctaaagtggcgacggtaatcaatgaactgttggcctcgggcccgcaaacggcgccgctgagcgacgtagaacaaaaagcggcgctggcgcgcgagaaatcccgcaaacccacgcgcaccaaagccgtgttgaagcacatcgccaacattttcgttcccatcctgccgccgctgatcgccgccgggattttgatggggctgaacaacgtcttggtcaactccgccgcctcctatgcgctgacgcacgccattgcggccagcggcgagctttctccggcccagatagtgttggatcagcgccatctgctgggcctgagccaattccttgatatcgtttccaaagcgctgttcagcttcctggccatctataccggcgtcaccacggcaaaagagttcaacggcaacgccatcatgggcggcctgctgggcgccatcaccatcgcgccccagctgcctcttttggggctgctccccggccagggcgggttgatcggcgttattttctgcgtctggctgatgtgcgtgctggaaaaacaggtgcgtcgcatcgtgcccgacattctggacgtggtcttgacgccgacgatcgtgctgacggtgatggccggcgccttgttgttcgccatcatgcccgtcgccggcctattgtccaacggcatcctgcacagtttgaacggcctgctggccacgggtgggctggccgccggcttcgtgctggcctcgctgttcccgttcctgatttcgctcggtctgcaccatggcctgttcccgatccatctggagatgatcaatgcgaccgggcatgctccgctgttcgccatccagatcatgtccaatgcaggcatggtcggcgccgccacggcggtgctgctgctgacccgcgatccggtgatgaaaaaaatcgccaaaggcgccattcccacctcgatcctcgccgtaggggaacccaccatcttcggcgtgaatattccggcgggattcgcctttatcaccggctctatcggcgccggcttcggcggcatgatggtcgtgttgctcggcgtctccaccaatggcgtcggcgccgcaggtctgtcggccctgccgctgatcgccgacggcaaatatctgcagtatatcttcgcctggctcaccggctgcctggcggcctttgtgctgacttacatcaccggcaagctgcgcaaatacgatcgggaaagcgtctgacgggacgacaaacagttaagggagcaaaaatgaaagccatcatgttgatgttcgattcactgaacaaacatttgctgtccgcctatggcagcgaccgggccatcacgcccaacttccagcggctgaaagaaagaacggtgcgtttcgacaatttctacgtcggcagcatgccctgcatgccggccaggcgcgagatccataccggccgctataatttcctgcaccggtcctggtcgccgctggagccctttgacgactccatgccggaaattctgaaaaagcacggtatccacacccatctggttaccgatcacaagcattactggcgcgacggcggcgccacctaccactcccgttacaacacctatgagttcgtgcgcgggcaagagggcgatgcctggaagggcgtggtcgacaagccgatttatcattatgaatccggcgagccggaagagatcaaacagcgccgcatcgccagccgcacgcagcatcaaattaacgtgcagtttatgaaggacgaacaggatcacccgctggccagaaccatccagaaaggcctggcgttcatcgacgagaaccacgcggccgataactggttcctgcaactggagtgcttcgatccccacgagccgtttttcgtgccggaaaaatacctgcggatgtacggcattgacgacgccagcgttttcgatggctggccgccctattacttcgtcaccgaaagcgaagaacgcaaggacgccattcagaagtactacctggccttgctgaccatggtggacgactatgtcggcaaggtcctggactacatggacaaatacgatttatggcgggataccctgctgatcgtcaacaccgaccatggtttcctgttgggggagcatgagtggtggggcaaaaatatcatgccgctgtataacgaagtggcgaatatccccttcttcatctggcatcccgagcatccttatcgcggcgaagcgcggcaggcgctggcgcaaaccatcgacattcccgccacgctgctggatttcttcaagctggacaagccggcggatatgcaaggcgcctctctggtgccagcgatttgcgacgatacgccgatacgcgactatgcgctgttcggctaccacggctgccatatcaacattaccgacggccgttatgtctatatgcgttcaccgcaggtacacggcgccgaggatctgttcgaatacaccctgatgcccaccagcatcaaccgccggctgtcccctgaagaactccggcacatgacgctgcatccgggattccgtttcaccaagggctgccaggtattgcgcatccccgcctcttcggtgatgacccgaggcgccgatcgcttcgggcaccggctgtatgacctggcggaaaatccgaagcaggatcgtcagtgccgggatgccgccgtcgccgaacgtctgctgtccgccatccgttgcatgctggaacaaagcgacgcgccgccggaactctgggcacgctaccaattgtcggaccccgcttctccgctgttgggcgccgatcctgactgggtgccggctttcaaagattatgcgccgcaggtgcgctacggtatgttggccctgatgcaacatctggaaggcactcatcaaacggcaataattgataaactgaatgcttccgccaaatcctcatggaccaccgccgatctgtgggccttcgtgcagcaagaagtgccgccagaacagcacgccggcgtgttttataaactggcgctggaaatgcggcttgattgagaggtcgccccgccctttcggcggggcgactgcagaacagaaggaaaattaacgatgggacaagaactggactactcgcgcggcgccaagccgctgtatgcccagctgtatgacatcctgctggagaagctgaaaaacggcgaatatcggaagaacgacgtactgccgacagaagccgagtttgaagaaatgttcggcgtcagtcgcatcaccgcgcggcgggcgctggccgaactggtcgcaaaagggttggtcaaacgtcaggccggcatcggcaccatggtcatcagcacatcggaaaagcagagcgtcaagacccgaatcagcttgatcgacggccagcaaacggaggcgatagcacgcaacaatctgtccctggcccctgtgcagccgccggagcctatcgcgcagttgttcgacgccgacaacgcgctactgctgacgcgcaccatttaccgccaaaacgaggaaccggcgcaggtcaactatatctatctgaccccgcgtttaaacacgctgacgttgtcggatctggaaaaagggttgtactgcgcattggaacagcacaacgaaaacatcgatgccttcgaggacatcatcacggccgaactgccgacgccggaagactgcgcaatcctcggcgtttccccctcggtgccgctgctggtcaaaacccgcaaagggtacaacgagcagggcctactggtggaatacaccatcgccaagcatatcgcgcgttactatcaatacatcgtcgagaacagcaaatgagctggtggacgcagggaaaatcaccggattaccggtttacattagctaatgaacgcacctttctggcctggatccgcaccgcgctgacctttatggccgccgccgtcggcctggatcagttgacggactcaacatcgctgaaggtgttgatcatcgtgctggcgcttacggcggcggcgctggcctgctacgcctaccatcgctgggcgggcaacgagaaagcaatgcggcatgaacaagccttaggctatccacgcctgctgatttggctcagcacgggtctggcggcagggatattgctgacgctggccacattggttcggccatgaacgccgcttgtccgcagcgcgatcctggcctgcagccggaaagaacggcgttggcgtggcagagaaccgcattctctctattgctgctggcgcttatcaccgcgcgtaccggcctttaccgcgaagaatatgtgctcgccgcactgggctgcgcttcttttttcgtggcgatgctgttggtatttggctcttttgttcggcaaaaatcgctgatgggcgcgatggcgctcccgcttgtctggtcggcgtggtttaaaagattgctcagcctcgccctcttgttcaatgcgctgggtctcgcgctgcacagtgcgctcatgctgttataggaaggaagtattcaatgacggctacccacggttgtctggtgatggcgaagcccaccggatcggtttgcaacatcgactgcacctactgtttttatcttgaaaaagaggcgctttatcccgaacgccagcagaactggcgcatgtcagatgaaacgctggcgctgtatattcaacagcatatccatgctcaggatggcgagcaggtgatgttctcctggcagggcggggagcccaccatgatggggctgccttttttccggcgcatcgtcgaactgtgccaaaaatatgccggcggcaagcgcattcaacacgcgctgcaaaccaatgggctattgctgaacgatgagtgggcgcgctttttcgccgaacaccgcttcctgattggcatttcgatcgacggcccgcaagcgctgcacgatcgttaccgtacctcgcgctcgggcaaaggcacccacgcccaggtactggccgccctcactctgctgcaagaacacggcgtcgaattcaacacgcttaccgtcgtcggtaagcataacgtcggccaggcgcgcgaggtttacgaatttcttttggccgcaggctctcgccatattcaattcattccattggttgaacgcctgagcacggcggagagcgccgcgctgaagctggttatgccgggcgaaagcgcagccacgctggcgccctggactgtgccagcctggcaatacggcgagtttctcaatcagattttcgatatctgggtgcggcgggatgtcgggcgcgtctctgtacagatgtttgacgtggcgctatccgcctggtgcgaacagccgccggtgctgtgcgtattcgccgaaacctgtgggcacgccttcgctctggaagccaacggcgatctgtataactgcgatcacttcgtctatccggagcatcggctggggaatattcatcagcaagatatccgcaccttgaataacagcgagcaggcgcatgcgttcggccgcgcgaaaaagacgtcgctaacgccggattgccgccaatgcgaattcaggttcgtctgccacggcggatgccccaaacaccgcttcgccgtgtcgccgtccggccatcctgggcataactatctctgcccggggtacaagcatttcttccggcatatctctcgcgaaatgaacctgatgaaggacttgctcgccaacggctacccggaacaggccatcatgtacgcgttggctcaggaacagcgggccggcgccggcagcgccaaacccaatgctccctgcccatgcggcagcggtaaaaagcataagaagtgctgcggtgcgaaaaaataagcccaaaagcccggtaaacgtcaccgggatccttaacttgcgtcacgctacttcaccgccagcgtgaccgcgtcctgcttgaagccgtagcggctcagcggcgtgatcatcaccgacgtcggtcgcccttccaccgccagcgtctgcgtctcgcccgccatcaggtagtagttctccagcgtcaccaccttgcccgacggctgcagcgtcagctgcggcgccagccgcaccacgtgcaacccgccgttgctgagcgtcagccgaccgtccgccgcgctcaaccgcaggtcgtcccacggcgtcttgctcaccgccaccgatttcggctgcaatatcagcccgatgctctggcgcaccggcatccgcgcgctgttgtccaccgcctgccctatcccctcgaacgacgccttcagcatcacctcgtgcggcagcgccgtacccggcttcagcacgaagttcacctgctggctctgccccgcctcgatgcgcgctatcggcggcgacagcagtaccgccttgctgaaccctttgccatccaaatcctccaccttcgtcgccagcaatatcggctccgacgagctgttcctgatgctgaagctcacccgccccgggttctcctccagcacgatgcccatgctctccagctgaaacgacgccccggcggaatgcgccagccccagcgtcagccacagcccgcccagcagctgcgccaggctccgttttatcgtcatgattgctcctctcttctcatccattatcggacgagccgcccgccgcacggcagacgccatcgccctcttcgtacaacaccgacgggtcaaacgccgccggcaccgcgtaactcaccacgcattcgttcatgttcagacgccgcacccgcagcgccttgccgatatcgtcattcaccagcatcaggttgccctcgcctatcagcgtacccagcagctgcccccgctcgtcgtgcaccgacgccccggtcggcagcagcgcgccgctctcatcccgcagggtcagcagcagctggcgcacttcggtcacccgaaaacgccgctctgccaccgtgccgcgcgccagctcgaacgccgcttcggtgctgtccagccgcaggttcagcggcagcgacagcgtatcgacctgcgcgcgcagcggcatataaggcatcagcatcggcagcagcgcgtcgccggcaaaatccgtcatgccgctgccgccgcccgacaccctgacccccgactgtcccgccaccctcatcaccgcgaaggtgtcgccgatgcgctgcggtgacgtcacccaggtgccgttggccacccccagcccgccagacgatgcaagcgacagcgaggaactgccctgcccgctgtgcgaggcccccagcgacagccgggtatacgccgtctcgccgctcaggttgccggcgccctggtactcgccgtccgcgtcccgcgtcacgtccaggtagccgttcagccgctcgctcaccggcccctgccagctgccgcccagcgtccgctgattgttgcgccgcgactgcagccggctgctgacgctgcccgccccccagggcaggctcagcccggcgtagaccgccgcacggtcgtaagcggaagactgcaggttgacgctcagcgtcgcccttcccaggctgacgccgtacgccagcgcatgggtccagctgcgccggctgtcgcggtaatagcgttcatgcgacagcgagtaggtcagcgccccggcgctcagggtgcgccaggagagcgccgcgccgccgttgtagcgctgccgggccgccccttccgcctctgcgggcgggttcagcccttcgtccgcgtcccgaaagccttcggtgcggtactgcgacgacagcgacagcgccagatggggccccagcgccacctgcccctgagcctccagctgcacgccgggctgccggccacgggtgaaggtcgcgccgcccgacagccagttgccggcgtcgtcactcacactgccctgccagcccagccgctggtaggtgcgcgccagcagcccgcccgccgttatctgcccccggccgagacggaatgcctgctcacccagcagcagcgccggcggcgaggcgccctcacgcccggcgccgtacggccggtagcgccccgccgccagccgatagccgcccgcccggcccgccgggtcgccggcgtcgggggtgaccgtaaagcgttgccgccgcccgtcggtttccgtcaacgtgacctcggcctccaccccggccatcaccggccccagctcgctcagcgaaaacggcccggccggcagcagggtgcggtacatcacctgcccgcgctgtttgacctccagcgtcgccgggctcgccacgctgccctgcagcggcaccgtcagcgccgcatcaggtgcgccggccgccagggaaagcagctgcccgccgctgagcggcacgttgccgctcagcgcgccgccggcgctgaactcaccgagctgaacctccgccccccaggcgggaaagtctttgctcgccgaggtctcgtatacctcgagccggctgccgctctcgtcgttgctgtagcttgagcgattgcgcagcacccagttgcgcaggttgacgcccggctccagcatcgcctgcagcgtctgctgattgccgtagcgcccctgacgccggttggcgtacaggtcgtagttcagcagcaccgcatggccgcccgactgctcgctgcgcagtttgtccgcatcgaacgccgcctccggcagggtgatttccacccgaaaggcgccgggaaacacctgcaccaccgcctgcggccagtgcgaatcgaaacgttcgcaggcccccggcggcggcgtgacccgcaaacgcagcgtctgcgccagccgttcatccagacacagcgccccctgcgaatcgaaacgcacctcttcctggtaacgctgcgccgcattgacctccagcgtcacccggtgcacgcccggcaaaaaccgggcggtattgaaaaattcggcgatatccgcgttgtaccccagctgcgccagggttttgacatcaaatccggcggcagcggttttcgtcatcggccagaccaacaaaaacagcaatgccgatgccctttgcctgatagacacgtcatcttctctgggttaatgccgggagcgacagattcagaaaaagggggagagtcctcccccttgcgttacccatcagacattacagtccgaacgcgaaatccagcgtggtggagccgtccagattggtgccttcgccgatacctccgtgcatatcgccgcttttggccaggaaggcctccacactcagtattgcggtgaaggtcttgccgatggccagcgtattggcatttgaagcccagcccacgcgcttgccgtgttcgagttgtacgctacccgttggggaggagatcgtgctgtcctgggtcacgaacagtcgaccgagtttgccatcaatctgcgggtgataggctgttaccgcatagaaccccaacttgccggtattattgatgctaccgagaccgaaggtttttcccgtctcgctggcggtgcccagacggttatcgataacgttgaaggtcatcggcgtttcggcatcgcatttcacctccatgatgccgttaccatttatccccaggctgaccgctttgtccctgctgattttcgtatggttgatgctgccgtaatcaaacaccccgtcgttagggagtgacacctcacaggtcggcgccaccagctcccccaccactttgatttccgcgctcgggccggcggccagactgcccccggcgacaagcagcgtggacgctaccatcacacgcaatgcaattttattcatcagtcgacatccttatatcacttcaatccaaagaactttttcgggcactcaaatgccgtacgcgaaactgagcgtggaagagccatccagtttgacgttgtcggtaattgggcccttcatgtctttggccgaggccagataaggctcaacctccagcatggcggtaaacagcttgccactgttttgtacgttgcccgactttgcccagccggtgatgttgtttttatcgatataggcggaactgacggtggtgaacgccgtggtgcctttcttcacgctgaacagcgccgaaggtgcggcattaaccccagcgctgaggacgttgactttataataaccgagcttgccgtcgccattgacgttccccaggccaaagtgagcgctgccggttgcactggcggtcccctcacggttatcgaccacggtgaaattcaggaaggtttcggcctcgcaattaacgaccagctgcttttgcgacttggctaacgccgtggccgccgctgagttaattaacccattggacagcttacccagttcgaaaacaccgtcgttggtgatggacacctcacaggatggcaccgccatttgccctttcactttcaattccggcgacatagaggccgcagagacctgattcgccatcatcaggattgcggcgatgcttgcagagattactgtttttttcatcatgaatatccatactcatagttaatattatcccgttcaaaacagatgacaggatgttaagcggagataaaccccgttttgccactcaaattcactgtcgttacccatgccggcgtaaaaacaatgcatgaattgacgctgcgcacttattgcttgttattcagagcccaaaaacgaaattcaacgtgacagagccgtccagccccactttatcgacggcgagaatattggcgtccagaaccggcgtcactgaaatatccatggtgtaggtctggccggcggcgcgcgtcgcatccgccagcaaccaatcggtacgctcaccggaaatcagcgcggcttcagtgttcggcggcactgacgcattgcgtgaacgcaacgtagccgggaagccgtttacggcagagtgagacagccccaacagaaaatagccaacgggttgcccatccggcgcattgcccagcccgaaacggcgcagatccggctcattgcggctggccgcgcggttatccgtcggaataatggccagataggtatcgccttcacagcgtacctgccaggtttgtttcaaggtcggtaatctctgcgcctcaccccgagcgcctccccgcacggcgccataatcataaacgccgtcattaccggcgataacggtgcatcctgaatgttttattttcccggatactttcaactcagccgaaggcgcagcgataagttgaccggaaaaaagaacccataaagcgatcaggcttgtttgcaacagtctctttttcatcccagcgtggtttccattcccattaatccgcacgcttgcaattacgcaagccatcgatgagataaatagttctcacttcccctgacgcagaagcgataaacgttctctcattagataaccatcaatttttacttctcagcacggcttcgcctgcatcaatgccagcgacgatgcaggaaatgccaatttagcgtcccggaacaacaattgaaatataaagctaaatacggaggaaaattcagagcatatagcagaataagtagaaaaaaataggctaagacgactaaaaaacaataaaatcataccaacagacagacaaacgccccatgataattacatttaattaaccgccacagccacacattaaaaatatacacagcacattaaaaccgaaaaacagcccgaatgataactcacataaataattaatatagatccaacaaaaaatgaatgatgatatgccgtcactcccccctcagatgtaacgacaaaggctctcgtttctctctgcgccgttttctcattgcgggaatgagctgaaaatattcgacacggcagatggaacacaaccgcaatcccatcatgataaccatcggaccgaattggcaaacaacgagcggtttacagcgcccgcgaatagacccgagaggcttctccccaggggtgatagccgagcccgttataaacgaagccattacgctcgtagtacccctccagatcggtgcacaggtgcagctgcgagaagcccaaccggcgagtttccgccgccacatgctcaatcagcttggcgccgcagccccggccgcgctgcgtttcctctacgtagagcgcacacagccagggatacagctcaccgcggctgataaagtcgttggtaatcagccccgcacagccgaggatctggtcatttgccatcagcaggtaccactgcggcagcgggttggcggcgccgaggctgcggttgatggcgtcttcatacatcatcagcgtctctgccgtggcccagtgccgctgaaaatacgcaatggcgcgcggcgccagctcgggcgcttgccgcaccgaaatcatgtccatggtcattcccgttattcatgttgtcagcgtagaattatgcagcaatatgcacggtatggcagcggcattccgccgccgtcattcactccaaggagtcatcatgacgcaaaacatctatgacaatcagacctttttcgacggctatgcgcagctcagccgctcgcagcacggcctggacggcgcgccggaatggcccgccatccgccgcatcctgccggatttgcagggcaaaagcgtggtcgatctcggctgcggctacggctggttttgccgcagcgcgcgcgaacagggcgcagccagcgtgctggggctggacgtctcggaaaagatgctggccaaggcgcgggagatgaccgccgacgcgggcatcgagtaccgctggcaagatttggcgcagctgcagctgccgccggaaagttatgatctggtctacagctcgctgacgctgcactacctcgaggatcttgccgcgctgttcgccacggtttacgccgcgctgaaacacggcgggcagttcatcttcaccgccgagcacccgatctacaccgccccggcgcagcagggctggctgaccgacggcaacgggcagaaatcctggccggtcaacggctaccagcgggaaggccagcgcgtctccaactggctggcggaaggcgtcatcaagcagcaccgcacgctcggcagctatatcaacccgctggcgcagcaaggatttatcatccagcatttgaacgaatggggccccagcgcgcagcaaatcgccgctaccccggcgctggacgaagagcaggaacgcccgatgatcttcattctcgccgcccgcaaacccgcctgattctgatctgattcacccgcagtaaaccgttcacaccaccacagttggggaggccgcctccccccaacgttactcaccaatcggcagatacccctgccacagcggccgggccggcttgccgtgcgggttggcgcgcagatgaacgtggtagccctgtagcgcctgcaacagcaggcagtcgtccacctcggccaggtcatccttgtgctgctgcgcgctgtcgatcagcagcgcccgtttggctttctctttcgcctcgccggcagagcgcgccacaaacaggccgaactggtgcagttccgccagctcatcgctgcggtaaccgcccacgttaacgaaaaacagcttctcttcaccggcgaacggcgcaggctccaggctcacgtcgtaaccgtccgcccagtcgatgcgcgcataaccgtcgacatgcaccttgcgcttatcgccgaaccacttttcgcgcagcagcggatacgcctcatccggccgatccgccgccgcgaactgcacgtcgtgcaactcaatattggcgcccggtgccgtaccccccacataaaacatcaataatcccggcatgttagtctgctctccctggtgataatcgctgtataatttaatgcataacgaaacatctgccaacggtagcgccattctgtgttatcaataggtgaggtttaatctgttgtggaggaacgcatggcattcaatatcggtgattttgtacaacgcaccaccggcggcccaaagatgaccgtggtggcgatcgacggcgaaaccctggtttgcagctggaatgaactgggtaaagagcagcgcacggaggtgcaggccagcgaggtggcgctgtaccatgaagacggcgatttcggcgtctgctgaacgctcggggcgcgcgccgcgccccgttatcgcctcaggcgcgaatgtcctgataggctggcgtggtatcaaactcatgcttggcgaacgggcacagcggaatgattttacgctgctcagcgcgcattttctccaccaccagcgccaccagctttttgccgacgccctgccccttcaatgactcatccacccaggtgtgatcgataatggtcagcttgtcgccgctcggcacgaaagagatctcggcgatcagcttgccttgctcatcattgatataaaaacgcttgtcgtctgccaagattttatgatccatatgatttctccctatatttaagtgcgccgctggggcagctgtcgataacgcgtttcacctcggccggctcggcattgtccggcataatccacgggcggcgattcagggtaaaaatagccgcgttgccatgcacgcagttggcggaatggcggcaaactgcactgttaaaataaacgtcaatcttatcaccggaataacggcggtaaccggcggcggtcaattcctcatccatcatggcctcacattgcctgttttattgtttttgctccagagtcaagtataggcaataccgccggcttcaccacgcgtctcgcccatcgaaaaaagtggcgcaaccgcccgtcgccgctagaaaaaaacgtaaattgttctaatctttatacagtaagacaacataattccgacagtggctaaggagttcgaaatgggtgatagctcaaaagacggcgtaattctgctgtcccgcatattgctgatgattctgtttatcattttcggttggatgaaactggtcaacttcggtgcgaccgtcacggcgatggaaggttacggcacgccgatgccttatttggcggcgatcgttgccgtggtggtggagtttattttcggcatcgcgcttattctcggcctgtttactcgccctatcgcggtcattttcgccctctatgttttgggcaccgcgtttatcggccatccattctggaaaatgaccggtatggaaatgatgggcaacgaaatcaacttctttaaaaacatcagcatcattggtggtttgctgttgctggcggtgaccggcgccggccgttattcgctggactataaaatatttaataaataattcatcgatggccggcgatattcgccggccattttatttcggcaatcctttcaacgactgcgcttggcgtggcgctcaaagttttccgccctggcctgcgccgatttacgcagcgtgacgtagcaggcgccctcgccgccgtcgcgcggtaaggcgcggcaaaacgcctgcacctgttcaaactgcgccagccatttggcgacgtaactgcgcacgatattcggatggctgtcgttctgccgcccgcggccatgcacgatcagcagcgaacgcaggttttgcgcctccgcctgcacgatgaagcgaaacagcgcctgccggctggcttcgaccggctgacgcagcaggttcagcgacgcctgcggcgggtaacgcccgttgcgcagcttgtccagcacgccctgctgaatgccttcccctttgaactccagcggctgttcgcaggggatcacctcgagaaaatcggtgctgaggaagttttcctgccgcagccgctgtgcttcgcgccgcgcgcttttgtccaccgtctcctgcggccggaggtgcaaggtctgccgcccgttcgccagcggcaccacgtccgccatcgcctgttcaaaaaagtctttttcctgctcgctcatgttccacctctcttgaacggcagcctttacggccgggaatggggtcgattgtaagacgccttgccacggttgcaagccgggaattgtcagcggcatgtgtctcatttgtcgtcaacgggtgagcttgcgagcagttttcgctatactgctaagccatcattgagtgccgcaaaggatcgagcccatgacaatgcgcgagctggaaatccagtttcaaaatgcgatgaatgagttgcagagcagcttcgaacggcaacaccgcgaatggcagcagagctaccaggcgctgcagcaactgctggaagaagccaaacagcgcgaagccgcgctgcgggcgcagaatgaacaactggcgcgcaaactgagcaccgccagttcggtgccggaacaacatgcgctggtcaagcagatcaaaatgcttggcgcccatctcgacgcgttggccaaagacgcggccacctttaaccaccatctgcgccagcagagcgcggtcggtaatttcagcggcgaacagcattgatagcgggcgctgtcgcacagcgcctctccctcttctggcgtattgagagtgtaataaagcctaaatgacctggatcatcctcgccgtcctgatcgtcgtatttattatcggttaccgcattctgacgtccgacacccgcaaagccatcgattcgctggcccatctgctgagggtcaaaccgatgctgatcgaatcgatgatccaggaaatgggcggccgccaaagccagacctttatccgcatgctgaacaacggctacaccgaagagatgcaccaggccgcttacctgctgttcatctatctgacgttcatcaaacaggcggacgacgaacagattgccctgtggcgcgacgtgctgctgcgcgccgggctgtcgccggagctgcacgccgagcacaccgaagcggcgctgttttacttcgccgagctggatatcgatgcatttgaactggcgcagttccgccgcgcctacaatgagcgtttcaaccgcgaagcgttggcccacggctgatcgcgtcccccgggcgggggaccgattacaggaacatgctgtagaggtagcgcgacagcgcttcgcgcgagctgaagccgtgtgcgatgccgtaacgcaggttcggggcgtcgctgcttaaatccaggggaaactccagatactgctcgctggtgcgcaccggcgaggtcggcgtggcgaaatgcacgcttctctctttcaacgccgggtggatcaccaatgcggttctgcccatccgcgcttcgcgattcacatacacataatgcgtacccttgcggtagccataggcctgatcggtgacataatcacgctcaaagccggtattctccaacactttagccacttcatccggccgtaaatacatcgattcctcctctcattctggaccgctgagcgaccttaccgtaatcattcaccgaaacaacgattttctggggaggaatccgggtttcggactattcctgaatcagcgccggctgcgctgcagcaggcgcagggtgagcagcaccccgatcgccaccagcagcgccgccgccagatagatcgacggcacgcccgcttgcccaatcagcagcccggccagcgggccggtgatgcccaacgccaggtcgaggaacgccgaataagtgccgagcgccgtgccctggttctgcggcggcacctgtttcaccgcctcaacgcccagcgccgggaacaccagcgaaaaaccggcgccggccagcaacgcgcctgtttgcactatccagggttcgccggcctgccagatcaacagcagcccgacgatctcgaccagaaacgacgccagcgtcaccttcaacccgccgtggcggttgatgacgttgctgaagatcaggcggatgccgacgaaggcgcagctgaacagcgtcagcgaaaacgccgcgccgctccagcccttgtcggcgtagtaaagggtgatgaacgtggcgatgacgccgaagccgacggtgcccatcgccagcccgagaccataggcccagatgcggccgaacaccgcgctgaaggcgatgcgctgcccggcggcgatcgagacgtccggcttgccgctcgccaacagcagcgccaccgcgaccgccagcacgatcagcgccgccaccccggccaagccccactgctgattcaggtacacgccgagcggcgcgccagccgccatcgccccgtaggtggcgacgccgttccaggaaatcacccgtgcggtgtgcatcgccccgacccggccgatgccccacagcgtggaaccggtgctggcgaagctttcgccgacgccgagaaacacccgccccacgcacagcagcagcaggctgagccacggataaccgtcaacgccaaacgccagcgcgtaaaacagcccgctggcgccgcagcacgtcaggccgaacagcaccaccttcttcggccccagctgatcggcgtagcgcccggcatgcggacggctgaacagcgtggcgaagtattgcgcactgatgataaggcccgccaacaccgagttgtagcccaggtggtcatgcacaaatcccggcagcaccgccagcggcaggccgatggtcaggtagcagacgaaggtgaacatcaccacggacagaatgcgtcggttcagctggaagttattttctgcggtcatcgaaggtggctcgcatcggacggggtagacgaagccctccagcataccccgatgagatttgatgataaatgagagagtgataacgaattattatttcgctaacgattttgccgccacccgcgcgcgcagaaaatcgataaacgcccgcaccttctccggcacatggcgggtattcgggtagagcgcatagatgctctgctcggggaaacggtgatccggcagcaaccgctgcagcctgccggcgtcgatctcgggctgcgccagccacgccggcagcaacgccaccccggcgccatgcagggcgaacgccagcaatgccgcggcgctgtcgccggtaagcgtggcggcgtccgccaccttgaacagcaccgcttcgcgctgcggcgtgaccacctgccagctgaggggcgaactgagccggctgtgggcgatccactgcgcctgcgccagatccgtcagcgaatgcatcggccggtcggccagataatccggcgccgccaccggaaaaatggcgaagctgtcgatcaaggccgcgcggtggctggaatccgccagctggcccagacggatcgccacgtcgaagcgctccgagatcagatcggcatgataagaagaagacacatgctggatgcgcaggcgcggatgctggcgcgaaaacgccgccagcgccggcgccaccacctgcgcgccgtactccggcgtgctggtgatgcgcagcacgccgctcagcccgtgatgatcgcggcgcacgtcgtcgagcacgttctccgcctcctgcaacaactgcaggctgcgctggtagaagcgttcgccggcatcggtcagcgataatcggcgggtgctgcgcaccagcagtgacacccccagctcattctccagctgcttgacgttaaagctcaccaccgccttggtttgccccagcgccaccgctgctgcggtaaagctgcccgcctccaccaccgccgcgaagatcgccaggcgctgcaaattcagcatttcgccgcccttattgtcaaaatgattttgacagtgtaatcgcccgccgccgatttatccgcacttttccccccgctacactgcccgccttcaaccggaggcaccatgtcttatcgcagcaaagtggcaatcgtctatctgctcggctttttcgtcgatttgatcaatatgtttatcgccaacgtcgcctaccccgccatcggccaggcgatgcgagcatcggtcagccagctggcgtgggtcagcaacggctatattctcggcctgacgctggtgatcccgctcagcgcctggctggcgcagcgcatcggcgggcggcgggtgtttctgctctccctggcgctgttcatgctggccaccctcggcgcgggcaacgccgacagcatcggcgcgctgatcggctggcgcaccctgcagggcatgggcggcggcttgctgatccccatcggccagacgctgacctatcagctgtaccgcagccatgaacgcgccgggctgtcggccgccatcatgttggtcgggctgctggcgccggcgctgtcaccggcgctgggcggctggctcgtcgatcggttggactggcgctgggtgtttttcgccaacctgccgctggcggccctggccctggcactggcggcgttgtggctacgtgcggaaacgccgacggcggcgcgcaaaccgctcgacgcgactggattactgagcgcctgcgcggcgctgacgctgctgctgctcggcctgacccggctgagcgaagccggtcatcaggtttccggcgcggcgctgctggccgccggcctgctggtgctggcctattatctgcgccatagcctgcgcaccccgcagccgctgctgaacctgcggctggtcggcgatccgctgctgcgcaacgccatggcggtttatttgtgcattcccggcctgttcatcggcgtcagcctggtggcgatgctgtatttgcaaaaccagctggggatgcccgccgcgcaggtcggcggcctgatgctgccctgggcgctggcgtcgttcctggccatcacgctgaccggcaaaagctttaatcgcctcggcccgcggccgctgctgatcgccggctgtctgttgcaaggtgccggcatgctgacgctggcgcagatcgatcaggccgggcagcacgcgtggcagatcgccgccttcgccctgatggggttcggcggcagcctgtgcagcagcaccgcgcagagcagcgcgtttctgcagatccccgacggccaattggcggacgccagcgcactgtggaatatcaaccgccagctcagtttttgcctcggcgtggcgctgctcagtctgctgctgaatctgctgctggccgtgttgccgcccgcggcggcttaccgaacctgcttcattctggcgggcgccagcacacttatcccgctgttgctgtgtctgcgcctcgccaaccgcgccatcgtgcgccaactcaacgctcaacaggatgctttatgaacccgtattttaccgaagtgatcgacgcccacatcgccattgaacgctggctgggcaaaggcgccggagaggagcaggcgctgctggcgcgctttacgccggatttcagcatgatcgcgctgaacggcgccacgctggatttcaccgcgctgtgcgcttttttccgcgcgcatcgcgccgccaaaccgggtctggaaatcgagatagaagagatgaagctggtggccgaatggccgacgggtgcggtagtcagctaccgggaaaaacagagtctgccgggacaaagcgccacgctgcgctactccacggtggtgtttgaacgccagcgcaacgcgctcggctggcggcatttgcatgaaaccgccgcggcgcaatgatcacaaaaagctgccggccaaaaacagttcccagccgacgatcaccccgcacagggttaccgcgctgaaaatgacttcaaacagatagcgattgatcatcgtgcgtcgcctcaaaagaagacacccggaagaaccgggtgtctggagtacggactggagcgtgcggaacctttcggttccgcaaacatcacttaattacgcttttttaccggcttttttgtggtgttttttagcggcctgagctttctgcactggcgcttttttgtggtgctttttagctgcctgggctttctgagccggcgcttttttgtggtgctttttagcggcctgagctttctgggctggcgcttttttgtggtgcttggctttcttgtggtgcgtcgctttagctggcgctttttcagcagccgccgctggcgcagcggtagtggtggtcgcagctggcgcggtggtggtagccggagcagtagctgcagtatcagcagcgaaagcaacagaagacagacccatagtggcagcaacgatcagcgctaatacttttttcatctttaaatcctcagagtgttgtttcggtaagctccggtggagccgttgaaacagatactagtggaatcaaaccgccgcttccgtgagtgattggtttcgccgagtaaccaaatgtacaaagcccaggtgccggcaaacacctgcgtgacggcggtttttttccgtgatcggccacgcaaatctcgacatggtctacacttaaaagacatgtgtcgaaatggagagctgaatgtttaagaaagcggaaagaacagaacgcgacatcgatcaggacgtcactctgttggccgatacgctggatgaagtgttgcgcgagtccggtgacaagaccaaagaggaactgaaagagctgcacagcaaggcgaaaggcgtgttgcgcgacgcccgggcgcggttcaatggctccaccagtctgacacagcatgcgcgcgacgcggtcgatcaagccgacagctatgtgcgtgacaaaccttggcagggcgtagggatcggtgccgccgtcggcatcgtgctcggcgtgctgctggcccggcgttaacacccctgcagtcataaagataaaacagatgtgcgtctggcccgcggaaatcgcgggccgtttaatttgcgtgtttaaacagctgcgctagcccctgcaccgcccgctccgcctcctctcgccggctgaaattggcgaaccccaacagtaacccctgccccgccggacgatcgatttgccaatccgacaacgcctgcgccgccagcccctgccgccacgctttcgccgccaacggcgcatccgccagcccgtgatgcagccgagccaacagctgaatgccgccctgctgcggcaccaccgtcagccaggcccccagctgccgttccagcgcctgcgtcaaccactcgcgacgctggcggtacagcggccgcatgcgtttcaggtggcggtagaaatgcccttggcggatgaaatccgccacgcttgcctgcagcagcggcgggcagccgcagccgcgcagccggctgctgcgcgcgaatgccgccgtcagaccggcgggcaccaccagataagccatgcgcagcgccgggaacagcgttttgctgaaagtgccggcgtacagcacccgcccctgaacatcgaggcttttcagcggcggcaatggtcgcccgtgatagcgaaactcgctgtcgtagtcatcctcgaggatccaggccccgcgctgctgcgcccagtcgagcagcgccatccgccgcgccaggctgagcgagacgccgagcgggctctgatgagtcggcgtgaccaccgccagccgcgcctcgggctccgtcaggataccggcggccacgtccattccctgttcatccaccggcacggcgaccggcctcacgccggcggcccgcagcagcgggcgcgtaaccggataaccgggatcttcgatccataccgcgtcaccggcgtgcaacagcgtctccaccacccagtccaacagcgccgggtagccggcgcagaggaaaatctgctccggctggcagctgatgccgcgcgacaaatgcagataatgggcgatcgcctcacgcagttcaggcaggccgccggccggcggcagcgccagggaagccaccgtagaaccgcgcagctggcgggcgacaatgcgctgccacagcgcacgtggaaacgcatccagcgccggcacgcccagttggaaaggctgcagcatgccctgcggctgcagcggatcgggcgccaccgccggcaacggcggtgcagcggacgccgccccctgcatgggcggcaactgcggcgagacataggtgcctgcctgcccccggctctgcaaaaaaccttcggcgatcagttgagcataggcgctttccaccgtggcgcgcgccacgccaagatcgctcgccaacccgcgtaccgaaggcagccggctgcccgccgccaggttgccctgggcgatggcgtctttgattcgcagataaatctgccggtacagcggttcggcgagacggctgtccaaacgcagcgaggtcaggaaagttggcatcatggcccggttaaataatcattttatggccctatagcatagaccataaggccgctaaagtagcgccatgatttcgttactatcgattgaggttgaccatgattaagcaacgtttgaattacgccgagctggcgcccgccccgtacaaaaatatggtgagcgcgctgatggcgctggagaaaggcgctctggacaaagcgaccatcgagttgatgtttatgcgcgtttcgcagatcaacggctgcgcctactgcctggacatgcacggtaaagcgctgcgcgaaagcggcttcagccacgccaaactcgatacgctggcgggctggcgcgtcagccatgagttcagcgagcgcgaacgcgccgcgctggaatgggccgagtcggtgacgctgatcgccgccaccggcgcgccggacagcgcttttgaggcgctgaaagcgcacttcagcgataccgagatcgccgatctgaccttcgccatcagcatcatgaacgccttcaaccggctggccgtcagcatgcgccaataatgcgttcgcctccccctcttctctgagaggggggaatttcccacccgaaaaaaaattttcccctcgccttcccagctccgacgcggtctgcgcacttaaccccacaaaacaccatatatagcgtggttgataaaacaaatatcaacatatagtattttataggtcagccgcagggaatgtcgttcggttgataacgccgtcagaaacgccaggaacgatgctccgttatctgacttgtccgcctttccttcagtctaaaggtaaatgcgaatcatgagcattattatttacagtaagccggactgtgtccagtgcaacgccacctatcgcgcatttgataagcaggggattgattatcaggtgatcgatctcacccaggatcagcaggcgctgaaccacgttaaatcattgggttatcagcaggttccggtgattatcgccggtgacgatcactggtccggtttccggccggacaaaatcggcgcgctggcgctcacctgctgaggctcgacgatgaatccgctggtctatttctccagcagttcggagaacacccaccgattcgttgagaaactgggcctgccggcgatccgcattccgatcgccggcgcccgcagcaaattgctgatggaacaaccctatatcttgatcgtgcccagctatggcggcggcagcgccgtcggcgcggtgccgatccaggtgatccgctttctcaacgttccgcaaaaccgttcatacctgcgcggcgtcatcgccgccgggaacaccaacttcggcgcagcgtacggcatcgccggcgacatcatcgccaaaaaatgccaggtgccttttttgtaccgcttcgagctgctcggcaccgcgcaagacgttgaaaacgttcgacagggagtaaccgcattttggcaacgacagaactgaccaggcccgagacgggcgcgctggattaccattcgctcaacgcgatgctcaatctttacgatgcggaaggccggatccagttcgacaaggatcggctggcggcgcggcactacttcctgcagcacgtcaaccaaaacaccgtgttcttccataacctggaggaaaagctgcgctatctggtggaagaaggctactacgagccgcaggtgctggcgcagtacgagttcccgtttatcaagcagctgttccagcaggcctacgccaaaaaattccgcttcgagaccttcctcggcgccttcaagtactacaccagctatacgctcaaaaccttcgacggcaagcgctatctggaacgctacgaagatcgggtgtgcatggtggcgatgacgctggcggcgggcgataccgccctggcgcaggatctggtggaggagatgatttcgggccgcttccagccggccacgccgaccttcctcaactgcggcaaacgccagcgcggcgaactggtctcctgcttcctgctacgcatcgaagacaatatggaatcgatcggccgggcggtgaactccgcgctgcagctgtcgaaacgcggcggcggcgtggccttcctgctgagcaatattcgcgaagtgggcgcgccgatcaagcgcatcgagaaccagtcttccggcgtcattccgatcatgaaaatgctcgaagatgccttctcctacgccaaccagctcggcgcacgccagggagccggcgcggtatatctcaacgcccaccacccggacattctgcgttttctcgacaccaagcgggaaaacgccgacgagaagatccgcatcaaaacgctgtcgctgggggtggtgatcccggatatcacctttgagctggcgaagaacaacgaggagatgtacctgttctcgccctacgacgtcgagcgggtgtatggcgtgccgttttcggagattgccgtcagcgagaagtaccgcgagatggtggacgacaagcgcatccgcaagtcgcgcatcaatgcgcgcgaattcttccaggtgctggcggagatccagttcgaatccggctacccgtatgtcatgttcgaggacacggtcaaccgggagaacccgatcgccggtcgcatcaacatgagcaacctgtgttcggagatcctgcaggtcaaccgcgccagtacgtatcatgaagatctgagctacgatcgcatcggcaaggacatctcctgcaacctcggctcgctgaacatcgccaaaaccatggacgcaccggacttcggcaaagcgatcgagaccgcgatccgtgcgctgaccgcggtggccgacatgagcgacatccgctcggtgccgtcgatcgccgaaggcaaccgcagcgcccgcgccatcggtctcggtcagatgaacctgcacggttacctggcgcgcgagcgtatcttctacggctcggaagaaggcatcgacttcaccaatctctatttctataccgtggcctatcacgccatccgcgcctcgaatcggctggcgatcgagcgcggcggcgcctttgacggctttgagcactcgcgctatgccagcggcgagtacttcgacaaatacaccgaacgcgactggctgccgcagaccgagcgggtgcgcgagctgttcgccgccgccggcatcgccattccggggcgcgacgagtggcgcgcgctgcgccagtcggtgatgatgcacgggttgtacaaccagaacctgcaggcggtgccgccgaccggttccatctcgtacatcaacaacgccacctccagcatccacccgatcgtctcgcgcatcgagatccgcaaggaaggcaagatcggccgcgtttactacccggcgccttacatgaccaacgacaacctggcgtattaccaggatgcctacgagattggcccggaaaaaatcatcgatacctatgccgccgcgacgcaacacgtcgatcaggggctgtcgctgacgttattcttccgcgataccgccaccacccgcgacatcaaccgcgcgcagatctacgcctggcgcaaaggcatcaagaccatttactacatccgcctgcgccagatggcgctggaaggcaccgaggtgcagggctgcgtgtcctgctcgctgtgaggcaacttatgacgaccgtaacatcggcgccgctggtgcgcgccatcaactggaacatcatcgaagacgacaaggatctggaggtgtggaaccgcctgacctccaacttctggctgccggagaaggtgccgctgtccaacgatatcccctcctgggccacgctgacgccgaaggagcagcagctgaccattcgggtgttcaccgggctgacgctgctggacaccatccagaacaccgtcggcgcgccggccctgatcgccgatgcgctgacgccgcacgaagaggcggtgtactccaacatcagttttatggaggcggtgcacgcccgctcttacagctcaatcttctccaccctgtgccaaacgccggacgtggatgacgcctatcgctggagcgaggaaaaccgcgcgctgcagaagaaagccggcatcattctggcgcactaccgcagcgacgatccgctgctgaaaaaagtcgccagcgtgttcctcgagtcgttcctgttctattcgggcttttacctgccgatgtactggtccagccgcgccaagctgaccaacaccgccgatctgatccgcctgatcattcgcgacgaagcggtgcacggctactatatcggctataagttccagaaagggctggagaaggtggacgccgcgcggcgccagcaggtgaaaaacttcgccttcgatctgctgcaggatctgtacgacaacgaggtgcgttacaccgaggagctgtacgacggcgtcggctggacggaagacgtgaagaccttcctgcactacaacgccaacaaggcgctgatgaacctcgggtatgaagcgctgttcccaccggcgatggcggaggtcaacccggcgatcctgtcggcgctgtcgccgaacgccgacgaaaaccacgacttcttctccggttcaggttcgtcctacgttatcggcaaggcggtcaacaccgaggatgaggactgggatttctgaggctggctagccgtatcaggaataaaccttcacgggagtgcggcgtgtcgtgctctcgcgactatgtgttttgcttgaattccgcacgcagctcaagccgccgccagatggcgcgtttttccgcgtcgctggcggtcggccaggcggcgatctccgcccgcgtgcgccggcatccgcggcactgctgggtttcgtcgtcgatccggcacaggctgacacagggcgatctgacgccaggatgggattgctgagtgtggcccgccatacgttgcccttgatgtgatatgttccgccacaggatacccgatccggcggcggcgcgtcgccaatcagatgatgccgccgttggcgcgcagggtttggccattgatccagccgccgtcggccccggcgagaaaagccaccgccgcggcgatatcttccggcgtgcccaggcgttccaacggcgccatcttcgccagccgctcgataagctccggggttttgccgtcgaggaacaagccggtggcggtcggccccggcgcgacggcgttcaccgttatattgcggccgcgcagctctttcgccagcacgctggtcagcgcttcgatcgccgccttactggcggcatacatgccgtaacccggctgcagcaaccccaccacgctggaggagaagttgatgatacggccgttgtcgcgcaggcgcttcgccgcctcgcgcatcgcattgaagctgcctttcaggttgatgtcgagcaggcgatccgcgtcttcatccctcatgtccgctatcggcgccagcgcgatcaccccggcgttattgaccagcacgtcgacgccgccaaacgcctgttcggcgctgtcgaacagccgggtgaccgcagccgcatcgctgacgtcggccttgacgctcaaggcgcggccgccgcgctgttctatcttgcgcaccagctcatcggccggtgccggattgcctgaatagttgatgatgacggtaaagccatcggcggccagacgctcggcgatggccgcgccgatgccgcgggatgcgccggtgacgatggcgacggagtgagttttctggttcatcgggagctccttaaagaaaacgacaggcatgacgttaatcatgcactgtttatcacggcgaatcagccccgattctctggcatcataatcccaaattatcgaacaatgccgctgggctctgttcgatggccgcccaacgggcggccatctccgttacagcgcgccgtaattcagcggcacccaggtgtaaccgtcgccctggcggttcaaataccccaaccccgggaacgacaggtgtgcgccccccaccagctcgctctgccgcgcgctatcgccaaatatccgcagccgctgagcgaccgccgccttggcatcgttatcaaagctgatagccaccttcggatgcggcatctgcaccgccgccacgtggatcagatcccccagcagcaacagcttctggccctggctggtcacctgatacacgctatgccccggcgtatggccgtgggcggcaaaggcggcaatgcccggggaaagctcaccgtcgccgctgaacggcttaaagtggccggccgcctgatacggcttgatcactgcctgagccctttcgaagttgctcttattgcccgcgctagcctgtttcagttggtccgcgcttagccagaagtccgcgtcctggctggcggcgcgcaccaccgcattggggaataccgccttgccgtcgtgcgtcaggccgccgaggtggtccgggtgcatgtgggtcaggtagatctcatccacctgctccggctggtagcccgccgcacgcaggttatccaccagcttgcccaggccgtcgcccagcagctggccagcgccgctgtcgatcatcaccagcttgtcgccggtattgatcagataagcattgaccgaggtgaccaccggcaggctttgatgccgctcggccaacccggcggcgatctgctgcggcgtactgttcagcaacagcttgtccgccggcaggcgaataatgccgtcggacaacgcggtcacttcaaagctgcccagcatgatgcggtaaaatcccggcgtcggggttttggcctgcggcgcggcggcgccggcctgtaacgacataacggccagcgccgcgcccaacagacaacgtttccagaacatgatgactccttgcgagaattgaacagcgctaagtattgacgcaaaaagcccgatgcgcctgtttaataaatgcctttgataaatatataaacaatatatttattattaataattttgtttgccgccccacacaaccccaatccatattttctcgttcgccacttggttattttccttactccctaaaccaagagtgaggaaatatcatgaactatcaattcgaaaacctggtctttgaaggcggcggcgtaaaaggcatcgcctatggcggcgcgctggaattgctggaggccaaaggcatcatgccgcagatcaagcaaacctccggtgcctcggcgggcgccatcgccgcactgctggtcggcctgggctgcagctcggcagacgtaaccaaaattctgtcggcgatagattttaaaaaattcctcgattataacggcggctttttcggcacgatccaggacgcctatcgcctgttcaatcaatacggcatcgcgcccggcgattatttctatcaatggtcgcgcgatattatcaaacaatataccggcaacccggatattaccttcgagcagttcgaagcgatgaaaacggcgaaagggttcaagtcgatttactttatcggcgccaacctcaacagcggccaacgcgaggtctattctcaccgcaccacgccgcgcatgaaagtggcggacggcctgcgcatttcgatgtcgttcccgttcgccttcgtagcgaagaacaataccctgggcgacctgtgcatcgacggtggcatgatcgacaactatccggtgcggctattcgattatgacttctccgccacgccgccttacatcgacagcgccagccagcgcatcaacacccgcacgctgggcattcgcctggattccgccagcgaaatcgcccaggccgccggccaggccggcccgcgcacgccggtcaacaacctgtttgatttcaccctggcggtggccaacgtgatgctggacatccaaaccaaggtgcatctggacagcgatgactggaaacgcaccgtgtatgtcgacacgctcgacgtcggcacgctggagttcggcatcagcgaggagaagaaacgcgcgctgatcgaatccggccgtcgcggcgtagagcgctacttcgcctggtatgacgccgccatgaaacaggcggcgtaaccggtgttttcccgcctgcgcgtcaggccggcgcgcgggcaaaaaaaatccccgcgggggcggggaaaggcaaagtaacgctaaggatttataggagttatacgaagaacttggccaacaccagcagcgacagcgagacgttgatagcgccgccgatacgggttgcgatctgggcgaacggcatcagcgacatgcggttgccggcggtgaggatcgcgacgtcgccggtgccgccctgcccgctctggcaacaggagacgatcgccacgtcgatagggtgcatgccgattttcttgccaacgaagaaaccggtcgccaccagcgcgctgacggtcgtgacgatcacgatcagattctggacggtaaacgcgtccaccagctcctgccacggcgtgatggccaccccgaccgcgaacaggatcggataagtcacggcggtgcggaagaatttgtacaccacctgcgaaccttcctgaatgcgcggcgacaccccgtgcgccagcttcaccgctacggcggcgaacagcatgcccaccggcgccggcaggccaattaggcggtgcaacagcatgcccaccatatacagcagaatggccaacagcgcaccgcaggcgatggtgctgacgtccaccttgccactgattttttccaccgcgttcatgttgctgtcgccctgcttactcggcatcaggctgccttcgccggtcaggtgcggataacgcttgcccagttggttgagcaggccggcgatgacgatggcggtcaggctgccgagcatcacgatcggcagaatgcgccccagcgccacgccctgctccatgtgcaggatcgccgcgtagcccatcgacagcgggatcgccccttcacctacgccgccggccatgatcggcaagatcaggaagaagaagatctggaacggctccaggcccagcgccatgccgacgcccatccccaccagcatgccgacgatctcgccgcacagcatcggaatgaagatgcgcaggaaaccctggatcagcacctggcggttcatgctcatgatgctgccgacgatgatgcagcagatgtagagataaagaatgttggtcgatttgtagaacttggtggtcgattccaccaccacgtccggcaacaggccatagtgcaccagcgcggaaggaataaaggtggcgcagatcgccgccgcgcccattttgccgatcaacggcaggcgtttgccgaattcgccgcaggcgaaaccaaagaacgccagggtggccaccatcaccacgatatcgctcggcaatttgccttccaggcagtcgagcagaatcaatacgccggccagaataaagaacggtaacggaataatccctactttataattgtccagtatccgccaccatttctcacgcagaggaatatcggcggtcttgtctttggctacgaggtaagaatcatctgttgtgctcataatctggcctcttattagtttgttcagccatcatagagaagcgcacggattatctgctgtgattatgttcaaagttaaaaagggtttttaatggtggttatggtttctatggggttaattaagattatgtaaaaatcgacgtggttttaatggtgttaataccgtttttattttaaagcttatcaattttatcgcaggcgaacaattctcgtccggttcactctaatcccgtgtgaaggatcacaagttgatcgggcgcaatattacagaccccgcttctcgtgatagggtaaggcttcaggatctctttacggtgaagctccgccatgcgcctcaaactctcatttcaaatcaagctgtttctgtgcctggtggccttctcctgcctgctgctgacctgtatcggcgcctacacctattaccagttggatgcgcagctgcaccgcgatctcggcgcccgcgcccaggtgcaggcgcgggaaatcgccctcattccttcgctggtggaagcagtggaaaaacacgacgccgccagaattgccgcgctgatgaaaaaaatccgcgccagcagcgacgccagttatatcgtcatcggcgatagtcatgcccgccacctttatcattccgaatacgaaggccgcctgggtacgccgatgatcggcggcgataataaagaggtgttggaagggaaaagcattatttccattcgcaagggcggcattggcgtttcattgcgcagcaaggcgccgatcctggatgaaaataatcacgtgatcggcatcgtttccgtcggctatttgaaatcgcatatcgataatttaaatgccaggacgttgacgcaaattatcggctccatcgttctgctgctgatcgccctgttcgtcttttcctggctgctgtcgaaaaacctcaagcgccagatgttctggctggaaccgaaagagatcgcgctgctggtgcgccagcaaaaagcgctgctggaagccatctatgaaggggtgatcgccgtcgatccacagctgcggatcatcaccatcaaccatgcggcgcgcgagctattggatctgcaccagcccgccgccagtttgctgggccggccgatcggcgaggtgatccaggcgcagcctgacttcttcgccgccgcgcaactgggccaggatacgcacgacgaggtgtgccgcttcaaccacgtgcgggtgatcgccagccgggtgcgcatcatgcaagagcaggagctgcaaggctgggtgatcagcttccgcgacaaaaacgacatcaataccctgagcagccagctcagccaggtgaaacgctatgccgacaacctgcgcatcatgcgccacgagcagctgaactggaccgccacgttggccgggctgttgcatatgcagcgctacgacgaggccattcgctatgtggaagcccaatccgagggcgcacaggagatcctcgatttcatctcgcagcgcttcagttcggcggcgctgtgcggcctgctgctgggcaaatattccagcgccagagaaaaaggcatcgagctgcgcttcgatccggcctgccaactgcggcaaatcccggcggcgctgaatgagaccgaactgatgtcgatcgtcggcaacctgctggataatgcggtggaggcgacgctgcactgcccggcgccgcacgacgcgatcgaactctatatcagcgatggcagcgacgagctggtgatcgaggtggcggatcgcggcaccggcatcgccgaggagattcgtgatacgctgtttgaacagggcgtcaccaccaaagcggataaaagcgaccacggcattggcctgcatctggtcgccagccatgtggcgcaggcgcacggcagcatagaagtgtcggacaacgagccgcacggcgcgatattctctatatttatccctaaataaaacccataacccgattttttgagcacccgattatgtcacacctagcactggacgttctgatcgtggaagacgagccgcaactggcgacgctgcacgcggagttcatcgagaaaaatttcaacctgcgggtggtggcttacgccgccacgctggccgaagcgcgggccaaagccaacgagcatcagcctcggctaatcctgctggataacttcctgccggacggccagggcatcgagttgatggaagaaccggcggtgaagaatcccgcctgttcggtgatcttcatcaccgccgccagcgacatgcatacctgcagccaggcgatccgcaacggcgccttcgattacatcatcaaaccggtgtcctacaagcggctgcgcaattcgctcgaacgcttcatgcagttcgtgcagacccagcgcaccttcaagatcatcgatcaggacaacgtcgatgcgctgtataacctgcagtcgaaacagttctccagcgagccgagcgccaaaggcatcgaaaccaacacgctggagctggtgcaggcgctgtttatcgcccagccggcggtggcgcatgcggtggaagacgtggttgagcaagtcggcatcagcaagaccaccgctcgccggtatctggaatattgcgtcgccacccagttcgtgcgggtggagatgctgtacggcaatatcggccatccgcggcggctgtatcgcaaggtctgaggctgccatctggctgtcatactcaggcgataacatgacgctcgacgatatccccctcgatatcggcacctgtcgttaaaactgatgaaatactgatgacttttacccggcctctggtcgggttttttattatccgaacggcaggtgcggcgccaaaatatctctctgcgccacaccgtattattttcccaaaaaccaaaccattatgccgaataatgaccgtcaattttgagtcacgggccaaattaccataactaattaaaaccttgatgtaaaccactaatatcccatttaaatgacattgagggttgtctcagatattcactgtgttagggtaaaaagctcttttattttgctaaggacagcccataacgcgttaattaaaccagaggaaacagcaaattgcatggcaattaaactcgaagtaaaaaacctgtataagatatttggcgaacacccggaacgcgcattcaaactgctggataaaggtctgacaaaagatcggctgtttgaaaaaaccggcttatcgctcggcgtaaaagacgccactctggccattgaagaaggcgagatatttgtcatcatggggctctccggttccggcaagtccaccctggtacgccttctcaatcgtctgatagaacccacccgcggtcaggtgctgatcgacggtgaggacatcgccaaaatatctgacaccgcgctgcgcaccgtgcggcgaaataagatcagcatggtatttcagtcattcgcgctaatgccgcacatgaatgtcctgaataacaccgctttcggtatggaattagccggcataccgctgcaggagcgccaggaaaaagcgctggatgccctgcgtcaggtcgggctggagaattatgcgctgtcttatccggatgaattatccggcggtatgcgccagcgcgtgggattagcccgcgccctggccaataacccggatatattattgatggacgaagccttctcggcgctcgatccgttaattcgtaccgaaatgcaggatgagctggtgaaattacaggctcagcatcagcgcaccatcgtgtttatttcccacgatctggacgaagcgatgcgcattggcgatcgcatcgccatcatgcagggcggtgaggtgatccaggtcggcacgccggacgagatcctgaacaacccggccaacgactatgtgcgcaccttcttccgcggcgtggacatcagtcatgtattcagcgccaaggatatcgcccaacggcgcccggtgacgctgatccgcaaaacccccggttttggcccccgctcggcgctgcagctgctgcgcgatgaggaccgtgattatggttatgttgttgaacgcgggaagaaatttatcggcgtggtgtcgatagagtcgttgaaaaaggcgctgtccgccaatcaaacgctggacgatgccctgctcgaggcccccgccgccgtgccggccgacacgccgctcagcgatctgatttccctggtcgcccaggcgccgtgcgcggtgccggtggtgggcgaagaacataactatctcggcatcatctccaaggccatgctgctgcaggcgttggacaaggagggctcaaccaatgagtgataccacgcaaacccaagatccctgggctaccgcaccggccgataccggcgccgcacctgccagcgatgccgccgccaacgccggtgacgcctggtccagcgcgccgccgccggccgcacatgacgccgccgggcaaagcgccgattggctcagcggcgccccggcgcagccggagcacttcagcctgctcgatccgttccacaaagcctgggtgccgttcgacacctgggtcacgcaaggcatcgactggctggtgctgcacttccgcccgctgttccagggcatccgcgtgccggtggacatgatcctgagcggcttccaacaactgctgctgggcatgccggcgccgatcgccattctggtgttctcgctgctcgcctggcaggtctcgggcctcggcatgggcgccgcgacgctgctctccctgatcgccatcggcgccatcggcgcctggtcgcaggcgatggtcacgctggcgctggtgctgaccgcgctgttcttctgcatccttatcggcctgccgctcggcatctggctggcgcgcagcaagcatgccgccaaggtgattaggccgctgctcgacgccatgcaaaccactccggccttcgtctatctggtgccgatcgtcatgctgttcggcatcggcaacgtgccgggcgtggtggtaaccatcatcttcgcgctgccgccgatcgtgcgtctgaccattctcggcatcaagcaggtgccggaggatctgatcgaggccgccgaatcctttggcgccagcccgcgccagctgctgttcaaagtgcagctgccgctggcgatgccgaccatcatggccggcgttaaccagacgctgatgttagcgctgtcgatggtggtcatcgcctcgatgatcgccgtcggcggcctgggacagatggtgctgcgcggcatcggtcggctggacatgggcctggccgccgtcggcggggtcggcatcgtgatcctggcgatcattctcgatcgcctcacccaatcgctggggcgcgatcgccgcagtaaaggcatcggccgctggtatcgccgcggccccatcgggttactgactcgcccgttcatcaagcaagcctgacgcttttcccgccggcggctgcggccccggcgggctatgacaccaccacatcgaaagaggggaaacactatgcgcaccacgggcatctgggctctcgccctgacgacgctgattggctcacagagcgtgagcgcggcagatttacccggcaaggggatcgcggtacagccggtgcaaagcaccatttccgaagagactttccagacgctgctggtcagcaaggcgctggaaaaattgggttacgacgtgaaagaaccgcgtgaagtggattacaacgtcgcctacacttcgatcgcctccggtgacgcgacctttatcgcggtcaactgggatccgctgcacgccgatcagtacaaggccgccggcggcgacgccaagttctaccgcgaaggcgtctacgtcaacggcgccgcgcagggctacctgatcgacaagaaaaccgccgagcaataccacatcaccaacgtcgagcagctcaaggatcccaagatcgccaagctgttcgacaccaacggcgacggcaaggccgatctgaccggctgcaccccgggctggggctgcgaagcggtgatcaaccaccacatcaaggcctatggcctgagcaacaccgtcgagcacaatcagggcaactacgcggcgatgatcgccgacaccattacccgctacaaagagggtaaaccggtgctgtattacacctggacgccgtactgggtcagcgatgtgatggtgccgggccgcgacgtggtctggctgcaggtgccgttttcctccctgccgggcgagcagaaaaacgttgacaccaaactgcctaacggcgccaactacggcttcccggtcaacaccatgcgcatcgccgccaacaagcagtgggccgcagccaatccggcggccgccaagctgttcgccatcatgaagctgccgatcgccgacatcaacgcgcaaaacctgcgcatgcatgaaggccaggcttcggaagccgatatccagaaccacgttaacggctggatcaaggctcatcaggccaccttcgacggctgggtgaaaaccgccgccgcagcggcgaagccgtaaccgttcaggggcgccgcctttgccgcgcccctaccccgccatatcgatgccgctgaactgtaaaaaacgtgcggcggcgttcgacaagggctgcggccaaatgcaatacacctggcgccgcggcccgtcttcaatcggaatcgacaccaacgcgcttaagcgttgcgcggtcgagacaggtacgatacccgccgccaacccgcgccgcaccagattctccagccattcgatatgatcgatctcaaaactgacgtgccggcggatgcccgccgccaggaaggcgcgatcggtttggcgccgcgcgccggtgccgctgtagaaatccaccagcggcacttccgccagcgcttgcaggttgacccgctcgcggttggccagcgggtgctgcggtgccaccaacgccaccagcggctcatcggtcaactgccggtgcgacatcggcagtaaatcgacatcgccgggccagatgccgacaaacgccatatcacacttctgctgacgcacgtcctccaacagggcttcgctcatgccaacgtaaaggcggatgttcaccgccggatagtggcgatgaaacttgtcgagcttttcggtcagatcaatcgcgtttatggttgaaatcgtgccgatggtcagggtgccggacaccgcatcgccggcggcggtcacctcttccaccagtgcctgctgcgccgccaacagccgctgcgccgacggaatgaaagcctggccggcgggggtcaatcgcacccggcgcgaggtgcgttcaaacagcgtacagcccagctcttcttccagtttggcgatctggtggctgagcgccgactgcaccgtatggcagcgctgcgccgcccgggtgaaactctgttcttccgccaccgccagcgcatagcggatctgtttcaggttcatggcatctatcttgaaatgagataaatcaaatgaaaattatacattggtttccgcagacgcgttgccggatactgcgcgctatcttcttcccgtgatgaaaaaatcatgaccccaaaaaacgcccatccgggcctcagcccggcgctgaccgtgctgatcgccatcgccaccggcctggcggtcgccagcaactattacgcgcaaccgctgctggaaaccatcgccaccagtttcaacctgtcggtcaaccaggccggctttatcgtcaccgccgcgcagctcggttacgccaccggcctgctgctgctggtgccgctcggtgatatgttcgagcgccgcgggctgatcgttttcatgacgctgctggccgccggcggcatgctgatcaccgccacctccgccacgctgccgatgatgatcctcggcaccgcgctcaccgggctgttctcggtagtggcgcagatcctggtgccgctggccgccacgctggcccacccggaaaagcgcggcaagaccgtcggcatcatcatgagcggcctgctgctcggcatcctgctggcacgcaccgtcgcgggcgcactggcgtcgttcggcggctggcgcaccatctactgggccgccagcgtgctgatgatcctgatggcgctgatcctgtggcgcgcgctgccgcgctataagcaacactccgggctgaactacccgcagctgctggcctcgatcttcagcctgttctgccgcacgccgctgctgcgcacccgcgccatcctcggcgccctgtcgttcgccaacttcagcgtgctctggacctcaatggcctttttgctcgccgcgccgccgttcaactattccgagggggtgattgggctgttcggcctagtgggcgccgccggcgcgctggccgcttcgcgcgccgggcatctggcggacaaaggcaaggccgggctgaccaccaccgtcggcctggcgttgctgctgctgtcctggatccctatcgcgttcgccaaacaatcgctgtgggcgctgatcgccggcatcctgatcctcgatctggcggtgcaggcggtacacgtcaccaaccagagcgtgatgtaccgcatcatgccggacgcgcgcaaccgcctgaccgccggctacatgaccagctactttatcggcggcgcgctcggttcgctgctctccgcctcggcctatcaacatgccggttggtacggcgtggccgccgccggcggggtgttatgcctgctcaacctgctgacctggtggctcggcaagcaccacgatccgcagggaccggcagcaatctgattatcgtgcaaatagtcactaaagaaatttattagcagtgcagggtataaacattacttactctctggtaatgttctgggcataaactattgaagtcctatctaccctgcgatccacaaccatgcaaagccaagctgcagacagcctcaatccgcccgccgtcagcgccaccttcgccaacggcgtcgtcgacagtttgccgatcgtcatcgggtatgtcccggtggcgttcgccttcggcctcagcgccgtcaaactgggtttttccccgctggaaagcattttcttctcctgcatcatctacgccggcgccagccagttcgtgatcaccgccctgctgagcgccgggatgtcgctgtgggtctccgcattgacggtgatggcgatggacgtgcgccacctgctgtacggcccggcgctgcgtcaccgcatcgtctcgcgcatgtcgcccggcaaaacggcgatatgggcctttggcctgaccgatgaggtcttcgccgccgccaccgccaggctgatgcgcaataaccgcagctggagcgaaaactggatgctgggcatcgcgctctgttcctggctctcctgggtggccggcaccgcgctcggcgcgctgttcggcaacggcccgctggagcagttcccggtgatcgaggcctcgctggccttcatgctgccggcgctgtttctcagcttcctgttggccgccttccgccgcccgcagagcctgactatcgccgccgcgctggccggcgcgctgctcggcgtggtgctgttctccattccggtcgccattttggccggcatcggcgccggctgcattgccgccctgttccagccagccccggcggaggccagccatgaacactgatgtgctggtgatcggcctggtggtgggctgcgccaattacctgttccgttatctgccgctgcggctggcgccggcgcgcgcccagcccggcctcaaacgcggtaaagccgccctgttgctcgacagcattggcatcgcctcgatctgcgccctgttggtggtctccagcacgccggtggtgatgcgcgaaccggacaaactgctgccgacgttggtggggttcgccgcgctggcactgtgcttctaccgcagcaaaagcatcattctgtcgacgctgctcggcgcaacggcctttggcgtcacattaaaactgttaatgcttttcggtgcaggctgacgccgctcccgatcgtttggcttcacattggcgttttcaggcgccacatctttacaaacactgacaaatgacacgaattgctaaattatccgcacggctgaacatttacattatttgtcaccgtcgttactatctcgaacgaaattaatgaggccctaaattatggaaagctcgtttgcccccatagaacaaatgctgaatttccgcgccacgcggcagaaagatttcccttatcaggaaatcctgctgacccgcctgtgcatgcacatgcaaggcaagctgctggaaaaccgcaataagatgctgaaagcgcaggggattaacgaaacactgtttatggcgctgattaccctggatgcgcaggaaagccacagcatccaaccttctgagctaagctctgccctgggctcctcgcgcaccaatgcaacccgcatcgccgacgagctggagaagcgcggctggatcgaacgccgggaaagcgacaacgatcgccgctgcctgcatctgcatctgacgccgcagggggaagaatttctcagtcaactgctgccgccgcagcaccaatgtctgcatttcctgtggtccacgctgaccgacgatgagcaaaaacagctggaacagctgacgcgcaaattgctggcacgtctggatcaaatggaaatcacagaacagttaccctaattcacaatttctgttcaggtacctacttatgcgatccccatttcactggagattcaccccgctgttcgccgtgttgctgctggccgggtgtgcttcgaccgataatattgccccgcaatccacgctgatggatccgcagagcctgcagttggctcagccgaaagtcagttcgctggccgtcagcccgcagtggtggcgcgccctcaaggatccgcagctggacgccctgatgacgcagacgctgcaaagttcgccgaccctgcgtcaggccgccgcccgcgtgcgcgaagcgcagagcgtggtgggcgaagccagcgccgccaacgggccgaacctggatctgaacgccagcacccagcgccagcgtgtgccgcagaacgtcaatatggggctggggtatccgcataagccgatctattcaagctccaactcgctggggttgaacctggcgtacgagttcgactggtggggcaaataccgcaaccaggtgaacgccgccaaggcgcaagtgaacgcagcgcgcgccgagcaggaacaggcggcgttgacgctgaccagctcggtggcgtccgcctactaccagctgcagagcaatctggcgctcgagaagctgctgcagcaggaagtgaacaacaacgagcgcctgaccgcgctgcgccaacagcgctatcaggccggcctgaccggcgtcgatgtgccgcaacaaacccaggcgcagtccgacgtcgccaagcagcagatcttgcagctgcagtcgcaaatcgaacagctcagacaccagctcgccgcgctggcgggccaggggccgaacgccatgcagcacctgcgtcaggtgccgctgcctgcagacaacctgatggcgccgcagggcgaactgacggcggatctgctgggcaaacgtccggacatcgccgcgcaacgccagctggtggagtcttacagccagcgcgtcagcgccgcgcgtaaagagttttaccccagcctgaccatttcagccttcgccggcctgatgaccaccaataccagtggcaccagcccgaatctgtttgaagcggccagccaggcctggaacgtgatgccggcgatctcgctgccgatcttccacgccggggccctgcgcagcaagctgggcgaggaatccgcgctgtatgacgaagcggtggaatcctacaaccaaaccatcctgaatgcggtacaggaaaccgccgacgccatcaccatccagcagagttctgcgcagcagcaactgcaggcggcgtccgcggcccagtcgatgcaacaggtgtatcaggtcgccaacgcccgttaccaggcagggattatcgggcgcgacgatctgttgaccagccagacgcagctattgcagcagcaacaggcggagttgaatgccagcagcaatttactgcaggcgaagataggactgatccgcgcgttgggcggtggctatcaggccccggccgcagcggattcgaaagcataataatataaggcttggagaacaccatgagcgcaagcgcggaaacccaaaacccgcagcagccgagcggcaaaaagaagcagcgcaaattttggctgctgttgctgacggttattttcattgttataggggtggcttatttagtgtattggttcctggtgctgcgtcatcaccaggaaaccgacgacgcctacgtctccggcaaccaggtgcagatcatggcccaggtgtccggcagcgtgaacagcgtcaacttcgacaacaccgactacgtcaagcagggcgacgtgctgctgacgctcgatccgaccgatgccgagcaggcgtttgaacgcgccaaaaccggcctggccaacagcgtgcgtcagacccaccagctgatcatcaacagcaagcagtatcaggccaacatcgccctgcgcaagaccgatctgagcaaggccgagaacgatctgaaacgccgcgtggtgctgggcagcgttgacgccatcggccgcgaagagctgcaacacgctcgcgatgcggtcgacagcgccaaagccgcgctggaagtggcggtacagcaatacaacgccaaccaggcgatggtgctgaacaccccgctggaacagcagccggcgatccaacaggccgccgcgcagatgcgcgacgcctggctggcgctgcagcgtaccaaagtgatcagcccgattaccggctatgtctcgcgccgcagcgtgcaggtcggcgcgcagatcgccgccggttcgccgctgatggcggtagtgccggccgatcacatctgggttgacgccaacttcaaggaaacgcagatcgccaatatgcgcatcggccagccggcgacggtggtcagcgacgtctacggcgacgacgtggtgtatcagggcaaagtggccggtatcgacatgggcaccggcagcgccttctcgctgctgccggcgcaaaacgccaccggcaactggatcaaggtggtgcaacgcctgccggtgcgtattgagctcgacgccaagcaggtggccgatcatccgctgcgcatcggtctttcgacgctggtgaccgtcgacaccgccaatctggacggccgcgtgctggccgacgtggtgcgcgacaaaccgctgtatcagagcgacgcgctggcgttgaatctggcgccggttaaccagctgatcgccgacgtgatccatgcgaacgccggctaagcgcgcgggaggccatcttgccacagaaaccgcttgaaggtgcccagcttgcctggatgacggtcgcgctcgccatggcgaccttcatgcaggtgctggactccaccatcgccaacgtggcgatccccaccatttccggtaacctcgggtcttccaactcgcaaggcacctgggtgatcacctcgttcggcgtggcgaacgccatctcgattccgatcaccggctggctggcgaagcgtttcggcgaagtgcggctgttcctttggtccaccgcgctgttcgccatcgcctcctggctgtgcggcatctccaacagccttggcatgctgatcttcttccgcgtgatccagggcgtggtggccgggccactgatcccgctgtcgcagagtttgttgttgaacaactacccgcccgccaagcgagcgatggccctggcgctgtggtcgatgaccgttatcgtcgcgccaatcttcgggccgatcctcggcggctacatcagcgacaactaccattggggctggatcttcttcatcaacatcccgatcggcgtcttcgtgatcgtggcggcgatggcgacgttgaaggggcgggaaaccaaaaccgagatcaaaccgatcgacaccgtcggcctggtattgctgatcgtcggcatcggttctctgcagatcatgctcgatcagggcaaggagctggactggttcaactcgaccgagatcatcacgctcaccgtcgtggcggtggtggcgctgctgttcctggtggtgtgggagctgacggacgaccatccggtggtggatctgtcgctgttcaagtcgcgcaacttcaccatcggctgcctgtgcatcagtctggcgtacatgctgtacttcggcgccatcgtgctgctgccgcagctgttgcaagaggtgtacggctataccgccacctgggcggggctggcgtcggcgccggtcgggctgatcccagtgttgctgtcgccgatcatcggcaagttcggcaaccggctcgacatgcgccggctggtgaccttcagcttcatcatgtatgccgtgtgcttctactggcgcgcctatacgtttgaaccgggcatggacttcggcgcatccgcctggccacagttcgttcagggcttcgccatcgcctgcttcttcatgccgttgaccaccatcacgctgtccggcctaccgccggaacgcatggcggcggcatcgagcctgtcgaacttcacgcgaacgctggcgggctcgatcggtacctcgatcaccaccaccctgtggacgcagcgcgaatcgcagcaccattcgcaactgacggagttcgtcaacccgtacaacccgcagtcgcaggagatgtaccggcaactggagcagctcggcatgagcaagcagcaggcgtcggcgtatatcgccaacgagatcaccgcgcagggcctgatcatctccgccaacgagatattctggctgtcggccggggtgttcctggtgttgctggtgctggtgtgggtggcgaaaccgccattcagctccggcggcggcgggggcggcggcgctcactaagcttcaataaacgaaacgggcgccctggggcgcccgtttttttatccgacgtagaaaattacgcctgattctgacgccaccagtccgccagcagaatgccggtcgccacggaaacgttcaggctttccaccttgccggtgccgccgatggacacgttcatatcgccctgctgccaggcgctgtcgctcagaccgtcgcgttcctggcccagcaccagcaccatcttggccggcagcttggcctgcgccagcgcggtgcctttgtggctggaggtggtgacgatggtgtaacccgccttgcggaaggtatccagcaccgacaggaaatcatcggcgttgatcgccttgatgtgctccgcgccgccttctgcggtgcgcaccgccgcgccggattccagcagcgccggatcctgcagcagcacgccgttgacgccgaagtgggcgcaagaacgaacgatggcgcccaggttatgcgggttgcccacttcttccagcgccaatacgcagtcggtcgccggcgcgcttttcaggtaggtctgcgcatccaggccctgacgctttttgatcaggaagcaaacgccgccgtggtgctcggtgccggaagccttggccagttcttcttcatccaccacgtggtaagctttgcggttagccgccatccagcgcagcgcttcgcggaagcgcggggtgaccgactgcacgaaccaggcgcgcacgatcgcttccggacggctggcgaacagcgcctgacaggcgttttcaccgtaaacgcgggtttcttccgcgcgctggcggcgcagctgctcaggatcgataaagcttttgccgctgatgccgccatgatcgaacgccggctcttcattcggcgcacgcgagacggttctccacggcgactcattgccaccgcgatcttcagagcgcgccggacggcgaggacgatcgctttcactgcggcgggagtcggcgccgcggcgatcgttgccgccgcgcgccttgtcttgaccggtgcggcccgatcgcgcaccgtcagccggacggcctttgccggccggacgtttattcttgttacggtcgtcgccgttgtcgtcgtcactgcggacgtacatcactttgactttaccgttcttgccactaaatgaatcgttcattgtcttctccaccaacgcgcagggcgcgaagattacctgatgttggtgcacgaagccaccaacttgcgctaaaagctcccaactatcacatccattgaacaaacctcattgttcacgcgccgggttttgccgataattgtcagcattaaagaaacatctccgcaaccgcgttgcggggaccatgctttctctgtacccgaggtcaacatgaatacagtttgtgcagcttgcaatgccaccaaccgcgtgccggaagaacgtctggcggacaatgcgaaatgcggccgctgcggccatgagctcttcgacggtgaagtgatcaacgccaccgccgccacgctggaccagttgctgcaggacgatctgccggtcgtggtcgatttctgggcgccgtggtgcggcccgtgccgcagctttgcgccgatctttgaagacgtggccgaagagcgcgccggcaaagtgcgcttcgtgaaagtgaacaccgaagccgagccggagctgagcgcccgtttccgcatccgcagcatcccgaccatcatggtgttccgtcagggcaagatggtcgacatgctcaacggcgcgatgccgaaagcgccgtttgacaactggctcaacgagttagtgtgattcggcaagtataggccgtatcccgccattgcgcgcgaacgcccccgatcgagcccgcccctcccggcgggcttttttctgcgttacaatagcggtttttccccaggatcgttatgaccgacaacgccgtacttcgcctgcgccaattccgtttagaccgcgccacccgcccttttttggcgcgcggttgccgggtggcgcgttgtcagggttgcctgctgccgcataaaaactgcctgtgcgacaccattcgcccacagcaggccggcagccgtttctgcctgatcatgttcggcgccgagccgctcaagcccagcaacaccggccgcctgatcgccgatatcctgccggacacccaggcgttcctctggtcgcgcaccgaggtcgatcccgccctgctggcggccatcaacgatccgacacggcagccttatgtggtgttccccgcgtcctacgccgacgccgaacggccggtgttcagcgcactgcccgtcggcggcaaaccgccgctgttcatcatgctggacggtacctgggcggaggcgcgcaaaatgttccgtaaaagcccgtatctcaatcaattcccggtgttttccctcaacgtcgacgccgcatcggactaccaactgcgcgaagccagccgcgccgagcaacactgcacggcggaagtggccgccgccctgctgcaacaggcgggcgatctgccggccgccgaagggttgaatcagcattttcgctatttccgtcaacagtatctggcgggaaaaccgacccggccggaggcatcggtcacagcaatgcagccataaagcgcctaaaatcaggcataacgttgccaaaaggagccgtgcatgagccagcgagggttagaagcgctactacgtcccaaatcgatcgccgtgctgggcgcttcgcagcagccgggccgcgccggcaacctgatgatgagcaacctgctggccggcggtttcggcggccccatcctgccggtgacgccgcgctacaaggcggtatgcggcgtcatggcctatcccgacgtcgccagcctgccgctgacgccggatctggcgatcatctgcacccacgccaagcgtaatctggcgctgctcgacgcgctggggcagcgcggctgtaaaaccgccatcgtgctctcttcgccaccggaacagttcgccgagctgaaagcctgcgcgcagcgctacgccatgcggctgctgggccccaacagtctgggactgctggcgccgtggcagggcattaacgccagcttctcgccggtgccgatccaaaaaggcaagctggcgtttatctcgcagtccgccgccgtcgccaacaccattctcgactgggcgcagcagcgcgaagtcggcttctcctatttcatcgcgctgggcgacagcctggatatcgacgtcgacgatctactcgactttttggcgcgcgacggcaagaccagcgccatcctgctgtatctggaaaacatcagcgacgcacggcgctttctctctgcctcgcgcagcgcctcacgcaataagcccattctggtgatcaaaagcggccgcagccaacaggcgcaattactgctcaacagccagcaagggctggacgccgcttacgacgccgccatccagcgcgccggcctgctgcgcgtgcaggatacccatgagctgttctcagcggtggaaaccctcagccatatgcatccgctgcgcggcgaacggctgatgatcgtcagcaacggggcggcgcctgcggcgatggcgctggacgagctgctcgggcgcaacggcaagctggcgacgctgagcgaggagagcctggcgaagctgagcgatgcgctgccggatttcattcgcgccggcaacccgctcgatctgcgcgacgacgccacgccgcagcgctacctggcggctcttgaagcgctgctcgacagccacgactatgacgcgctgctgctgatccatgcgccgagcgcggcggcgccgggcaccgccacggcgcagcggctgatcgacgcgctgcaccgccatgcgcgcggcaaacgcatcaccttgctgaccaactggtgcggcgaatactcttctcaagaggcgcgccggctgtttaccgaggccgccattcccacctaccgcacgccggaaggcgctgtgaccgcttttatgcatatggtggaataccgccgcaaccaaaagcagctgaaagagacgccggcgctgccggtcggcctgaccgccaataccgccgacgcccaccgcctgatccatcaggcgctggccgaaggcgccacccagttggatacccacgaggtgcaatccattctgcaggcctacgatctgagcaccctgccgacctggatcgccgaagacagcgccgaagcggtacatatcgccgagcagatcggctacccggtggcgctgaagctgcgctcgccggatatcccgcacaagtcggaagttcagggcgtcatgctctacctgcgcaccgcgaccgaagtgcagcgcgcggcggaggcgatcctcgaccgcgtgaagcgcacctaccctcaggcgcgcatccacggcttgctggtgcagagcatggccaaccgcgccggcgcccaggagctgcgcatcgcggtagagcaggatgcgattttcggcccgctgatcatgctgggcgaaggcggtgtggaatggcgccaggaaaatcaggtggcggtcgcgctgccgccgctgaatatggcgctggcgcgttatctggtgctgcaggcggtgaaaggcggcaagatccgcgggcgcagcgcgctgcggcctttagatatccccgggctaagccgcttgctggtgcaggtctccaacctgatcctcgactgcccggagatcgcccggctggatattcacccggtgctggcttccggcagcgaattcaccctgctggacgtgtcgatgcagctcgcgccgttcagcggcgatccgcaggcgcggctggcgattcggccttatccgcatgagctggaagagaccatcgcgctgaaagacggcagccaatgcctgttccgccctatcctgccggaagacgagccggcgctgaagcatttcatcgaccgggtgaccaaggaagatctctattatcgctacttcagcgagatcaatgagtttacccatgacgatttggccaacatgacgcagatcgactacgatcgagaaatggcctttgtggcggtgcgcgcagaagagatcatcggcgtgacccgcgcgctgtccgatccggacaacaccgacgccgaattcgccgtgctggtgcgttccgacctgaaaggcctgggcctggggcgtcaattgctggagaaaatgatcgcctatgcgcgcgcgcatggcctgacccgtctgagcggcatcaccatgccgaataaccgcggcatgatcgcactggctcagcggctgggctttggcatcgaggtgcagcttgaggacggcatcgtcaatctgacgctgccgctgcgggccgccgacgcgcagtgacctgcgtcgcaatgcgctacgaatccaccacttaacgccaaaacatacgcacaatcggggcaactaatggtattatcgcccgattattcggtttattgtttttatgcctgtggcgttctggccatcaatcatgagagaagaaacgcactgtgatgttgtcaaaatttaaacgtagcaaacatcaacaacaccttgcacaactgcccaaactcccccagacggttgctgatgttcgtacgttgtacgcgccgtccgattttcgcaccacgctgctggacgccatcgccaacgccacccaacgcatctatctggtggccctgtatctggagcatgacgacgccgggcgcgagatcctcaatgcgttgtatcaagccaaacagcggcggcccgagctggaaatctgcgtactggtcgactggcaccgcgcacagcgtgggcgcatcggcgccgccgccgccaataccaacgccgactggtactgcgccatggccagccaacatccggaacagtcggtaccgatctacggcgtgccggtcaatacccgcgaagcgctgggcgtattgcatctgaagggctttgtggtcgacgataccgcgatctacagcggcgccagcattaacgacgtttatctgcatcagcatgagaaataccgttacgatcgctaccagctgatcaccaacggcgtgctggccgataccctgatcgattacatcaagcagcatctgctcactgccggcgccgtacaacgcctggatcgcagcgatcggccgaaaagcccggagatcaaaaacgagacccgtctgttccgtttcgccctgcgccgcgccggttatcacttccgcggcaaagccggcaacgatgagctggcggtgacgccgatggttgggctaggcaaacaaagcgtgctgaataaaaccattcatcacttgatgtcgtgcgccgaccagaaactgacgctctgtaccccctacttcaacctgccggcgctgctggtgcgcaacatcatttatctgctgcgacagggtaagcaggtggaaatcatcgtcggcgataaaaccgccaacgacttctatattcctgaagaccagccgttcaaaatcatcggcgcgctgccctacctgtatgagatcaacctgcgccgcttcctgagccgcttgcagcgttacatcgacaccggccaactgatcgtgcggctgtggaaggatggcgataacagctatcacctgaaaggcatgtgggtagacgaagagtggcagctgattaccggcaataacctcaacccgcgcgcctggcggctggatctggaaaacgccattctgatccacgatcccaagcaagagctgcgcgagcaacggcagaaagagctggaatgcatccgaactcataccactgtagtcggccattatcaggaactgcaaagcattcagcagtatccgatcaaggtgcgtaagctgattcgccgtctgcgccgcatccgcatcgatcggctgatcagccgtatcctgtaagcggtatgctgaccccggccaaggccggggtttttattacagctgtatctccttgcctttgcgatgcagtcggagtgaaaccagcaacgccagcaggcacatgccggagacataccagaagaaagcgttctccacgccaaacgatttaagcgacagcgcgacatattccgccgagccgccgaacatggcgttcgccaccgcataagacaagcccacccctaacgcgcgcacctccggcgggaacatttcggctttaagcagcccgctgatcgcggtgtaaaaactgatgatgaacagcgccagcacgatcaggccaaacgccatataaggattactcacctctttcagagcgaacaggatcggcaccgtcaacaccgtggcgaaggctgagaagatcagcatcgagctgcgacggccgattttgtccgaaaacgcgcctaccgctggctgcagcagcataaagacgaacagcgcgacggtcatgatggcgctggccagcttggcgtccataccggcggtgttcaccaggtatttctgcatgtaggtggtgaaggtgtaaaaggtcagtgaaccggcggcggtaaagcccagcaccatcaggaacgccttgcgatttttccacagccccgtcagcgaaccggcatcctcgtggttacgcgtcttcgcatcggaggtttcattcagcgaacggcgcaggtacagcgcgactatcgccaacacggcccccagggcaaacggaatgcgccatccccaggctttcagctcttcagcgggcaatatctgctgcaggatcaccaggaccagcagcgccaacagttgcccgccgatcagcgtgacatactgaaacgaggcgtagaagccacgccgccccttgatcgccacctcgctcatgtaggtggcgctggtgccatactcgccgcccaccgacaacccctggaacagacgggcgatcagcagcaacgctggcgcccagctgccgatcgattcatacgtcggcaggcaggcgatcaccagcgatccggcgcacatcatgcagactgaaagcagcatggagttttttctgccatgcttgtcggcaatatagccgaacagccagccgccgatcggccgcataaagaagccggcggcgaataccccggcggtttgcaacagctgcgtggtgctgttgcccgctggaaagaacgaggcggcaaagtaaatggaacagaaggaataaacgtaaaaatcaaaccactccaccagattgcctgatgaagctccgacgatagcgaaaatgcgtttcttgttatccagcgccccctgttcgacgccgtgctcatccccaagagccgaggttgtttctgtcatgatattttctccgagccatagcaatgatgaaattcggcttcctgccgccctggttgttactttattgttatttataagttaacagccaaacttaatagcggacgaagaatatctgacattcagagaaacaatgcgttggttttgtgatgaatattaaacagtacgatgaaagctgaagcggattacaacggggattttccatttttcccatagcaaaaagccctgaacgtcagttcagggctttcggctttatttgatgcctggcagtgtcctactctcgcatggggagaccccacactaccatcggcgctacggcgtttcacttctgagttcggtatggggtcaggtgggaccaccgcgctattgccgccaggcaaattcgtttcattccaaccgcttcatcgctgaagcctgtcaatccaatctgtaaacaagctgaatattgtcttggtctcaccaaaacaccttcggtgttgtaaggttaagcctcacggatcattagtactggttagctcaatgcatcgctgcacttacacacccagcctatcaacgtcttagtcttaaacgttccttcaggggccttaaaggcccagggaagactcatcttgaggcaagtttcgcgcttagatgctttcagcgcttatcttttccgcacttagctaccgggcaatgccattggcatgacaacccgaacaccagcggtgcgttcactccggtcctctcgtactaggagcaacccctctcaatcttccaacgcccacggcagatagggaccgaactgtctcacgacgttctaaacccagctcgcgtaccactttaaatggcgaacagccatacccttgggacctacttcagccccaggatgtgatgagccgacatcgaggtgccaaacaccgccgtcgatatgaactcttgggcggtatcagcctgttatccccggagtaccttttatccgttgagcgatggcccttccattcagaaccaccggatcactaagacctactttcgtacctgctcgagccgtcactctcgcagtcaagctagcttatgcctttgcactaacctcacgatgtccgaccgtgattagctaaccttcgtgctcctccgttactctttgggaggagaccgccccagtcaaactacccaccagacactgtcctcaccccggatcacggggccgagttagaacatcaaacattaaagggtggtatttcaaggatggctccacgcagactggcgtccacgcttcaaagcctcccacctatcctacacatcaaggctcaatgttcagtgtcaagctatagtaaaggttcacggggtctttccgtcttgccgcgggtacactgcatcttcacagcgagttcaatttcactgagtctcgggtggagacagcctggccatcattacgccattcgtgcaggtcggaacttacccgacaaggaatttcgctaccttaggaccgttatagttacggccgccgtttactggggcttcgatcaagagcttcgccttgcggctgaccccatcaattaaccttccagcaccgggcaggcgtcacaccgtatacgtccactttcgtgtttgcacagtgctgtgtttttattaaacagttgcagccagctggtatcttcgactggcttcagctccatccgcgagggacttcacctacatgccagcgtgccttctcccgaagttacggcaccattttgcctagttccttcacccgagttctctcaagcgccttggtattctctacctgaccacctgtgtcggtttggggtacgatttaatgttacctggagcttagaggattttcctggaagcagggcatcaactacttctgcaccgtagtgcatcgtcatcacgcctcagggttaatatgcaaccggatttaccaggtcacaccccctacacgcttaaaccgggacaaccgtcgcccggccagcctagccttctccgtccccccttcgcagtaacaccaagtacaggaatattaacctgtttcccatcgactacgcttttcagcctcgccttaggggtcgactcaccctgccccgattaacgttggacaggaacccttggtcttccggcgagcgggcttttcacccgctttatcgttacttatgtcagcattcgcacttctgatacctccagcaaccctcacaggccaccttcaacggcttacagaacgctcccctacccaacaacgcctaagcgtcgctgccgcagcttcggtgcatggtttagccccgttacatcttccgcgcaggccgactcgaccagtgagctattacgctttctttaaatgatggctgcttctaagccaacatcctggctgtctatgccttcccacatcgtttcccacttaaccatgactttgggaccttagctggcggtctgggttgtttccctcttcacgacggacgttagcacccgccgtgtgtctcccgtgataacattcttcggtattcggagtttgcatcggtttggtaagccgggatggccccctagccgaaacagtgctctacccccgaagatgagttcacgaggcgctacctaaatagctttcggggagaaccagctatctcccggtttgattggcctttcacccccagccacaagtcatccgctaatttttcaacattagtcggttcggtcctccagttagtgttacccaaccttcaacctgcccatggctagatcaccgggtttcgggtctataccttgcaactaatcgcccagttaagactcggtttccctacggctcccctatacggttaaccttgctacaaaatataagtcgctgacccattatacaaaaggtacgcagtcacaccacgaaggtgctcccactgcttgtacgtacacggtttcaggttctatttcactcccctcgccggggttcttttcgcctttccctcacggtactggttcactatcggtcagtcaggagtatttagccttggaggatggtccccccatattcagacaggatgtcacgtgtcccgccctactcatcgaactcacgacctgtgcattttagtgtacggggctatcaccctttactgcgcgactttccagacgcttccactaacacacaagccgattcaggttctgggctcctccccgttcgctcgccgctactgggggaatctcggttgatttcttttcctcggggtacttagatgtttcagttcccccggttcgcctcatgccactatgtattcatgacatgataatgtgtcgaaacacactgggtttccccattcgggtatcgccggttataacggttcatatcaccttaccgacgcttttcgcagattagcacgcccttcatcgcctctgactgcctaggcatccaccgtgtacgcttagtcacttaacctcacaacccgaagatgtttccatcgttcgcgctgcaaacatttgagagactctatgacaggttactctttatcccaatacttctacggagggacaaatttcagccgtcatgtttcaattttcagcttgttccagattgttaaagagcaaaatacttcgcagcatactgtcgccaatatactctgaagtattgaaataccggactatatggtggagctaagcgggatcgaaccgctgacctcctgcgtgcaaggcaggcgctctcccagctgagctatagccccatacagtcacgcgcagtaccttttccacttcataagaagtggtaggcctgagtggacttgaaccaccgacctcacccttatcaggggtgcgctctaaccacctgagctacaagcctataaaggtatttctgctcgttactttctatcagacaatctgtgtgagcacgccacgcgaactaatatctttaggtaaggaggtgatccaaccgcaggttcccctacggttaccttgttacgacttcaccccagtcatgaatcacaaagtggtaagcgccctcccgaaggttaagctacctacttcttttgcaacccactcccatggtgtgacgggcggtgtgtacaaggcccgggaacgtattcaccgtagcattctgatctacgattactagcgattccgacttcatggagtcgagttgcagactccaatccggactacgacgtactttatgaggtccgcttgctctcgcgaggtcgcttctctttgtatacgccattgtagcacgtgtgtagccctactcgtaagggccatgatgacttgacgtcatccccaccttcctccagtttatcactggcagtctcctttgagttcccggccgaaccgctggcaacaaaggataagggttgcgctcgttgcgggacttaacccaacatttcacaacacgagctgacgacagccatgcagcacctgtctcagagttcccgaaggcaccaaagcatctctgctaagttctctggatgtcaagagtaggtaaggttcttcgcgttgcatcgaattaaaccacatgctccaccgcttgtgcgggcccccgtcaattcatttgagttttaaccttgcggccgtactccccaggcggtcgatttaacgcgttagctccggaagccacgcctcaagggcacaacctccaaatcgacatcgtttacagcgtggactaccagggtatctaatcctgtttgctccccacgctttcgcacctgagcgtcagtcttcgtccagggggccgccttcgccaccggtattcctccagatctctacgcatttcaccgctacacctggaattctacccccctctacgagactctagcttgccagtttcaaatgcagttcccaggttgagcccggggatttcacatctgacttaacaaaccgcctgcgtgcgctttacgcccagtaattccgattaacgcttgcaccctccgtattaccgcggctgctggcacggagttagccggtgcttcttctgcgagtaacgtcaattgatgaacgtattaagttcaccaccttcctcctcgctgaaagtgctttacaacccgaaggccttcttcacacacgcggcatggctgcatcaggcttgcgcccattgtgcaatattccccactgctgcctcccgtaggagtctggaccgtgtctcagttccagtgtggctggtcatcctctcagaccagctagggatcgtcgcctaggtgagccattaccccacctactagctaatcccatctgggcacatctgatggcaagaggcccgaaggtccccctctttggtcttgcgacgttatgcggtattagctaccgtttccagtagttatccccctccatcaggcagtttcccagacattactcacccgtccgccgctcgtcacccagggagcaagctcccctgtgctaccgctcgacttgcatgtgttaagcctgccgccagcgttcaatctgagccatgatcaaactcttcaattaaaagcttgatttgcttccactcgagaagcgatgctcaaagatttactgcatgaattttacttcagttagtcactcttcaagacttgatattttttgcatccgaagatgctggatatcgtcttgtggagtgcccacacagattgtctgataaattgttaaagagcagtgagttaggcgctttcgcttgctaactcgaggtggcgtatattacgctttcctctttcagagtcaaccctaattttcaggattttttctctttcttcccggccgctgtgtgaagtgaatcacttgcgccgtgtcgatggaggcgcattatagggagccggttcagaatgacaagcgataatatgcattttttatctgaccgctcactattcatgcgtaacgcctattaaacccgctttttgatggctgccggcaggtccgccaggctatttagcacccaatcggccagcttttcaccctgctccgtcaccggcttgccggtacgcaccagcaccttggtgccgacgccggccgcgatcgccgcctgcatatcttccggtttatcgcccaccatataagaagcggccatatcgatgttcaattcctgctgcgcttgcagcagcatgcccggctgcggtttacggcagtcacagacctgacgatactcttccactaccgcctccggatgatgcgggcagaaatagatgccgtcgaagtcgacgtcgcgatcggccagcgaccagtccatccactcggtcaggtacataaactggtcttcgctgaacttgccgcgcgcaatgcccgactggttggtcaccatcaccagcgcgaaccccatctttttgagttcgcgacaggcgtcaatcacgccgtcgataaagtggaagttgtcgatttcatggacataaccatggtcaacattaatcgtaccgtcacgatcgagaaaaattgctggaacgctttgtgtcaccgctttgctcctgaggggctgaatacgctgacagtatcgcatgttttaccccgcactgagaacgccggagaacgtcgctggtcgttgacttagacgtctagacgccttaacatctgatccataccttggttccacgccgaggtttacttttatctagccacgggcaaccacgctaaaataagaagaatatgattaaactttctaacatcactaaagtgttccagcagggttcgcgcaccattaccgcgctctctgacgtgacccttcacgtccctgccgggcaaatctatggcgttatcggctcttccggcgccggcaaaagcacgctgatccgctgcgccaacatgcttgagcgccctacctccggccaggtgctggtcgatggccaggatctgacgtctctgtcggaaagcgaactgacgcgcgcccgtcgccaaatcggcatgatcttccagcacttcaacctgctctcttcccgcacggtgttcggcaatgtggcgctgccgctggagctggacaatacgccgcgcgccgagatcaaaaagcgcgtgaccgaactgctggagctggtcggcctggcggacaaacacgacgcctatccggccaatctgtccggcggccagaaacagcgcgtggcgatcgcccgtgcgctggccagcaatcccaaagtgctgctgtgcgacgaagccaccagcgcgttggatccggccaccacccgttccatcctggagctgctgaaagacatcaaccgccgtctgggcctgaccattctgctgatcacccacgaaatggacgtggtgaaacgcatctgcgaccaggtcgcggtcatcagccaggggcagctgatcgaaaaagacagcgtcagcgaagtgttctcacacccgaaaaccccgctggcccagcagttcattcagtccacgctgcatctggatatcccggacgactacgccgcgcgcctgtcgccggagcgtcagggcgaccgccagccgctgctgcgcctggagttcaccggtcagtcggtcgatgcgccgctgctgtctgaagccgctcgccgcttcaacgtgaacaacaacattatcagcgcccagatggattatgccggcggcgtgaaattcggcgtgatgctggcggagctgcacggcagcgacgaagacgcgctggcgacgattaagttcctgcaagaaaatcaggtaaaagtagaggttctgggttatgtctgaggcaatgatgtggttgatggcgcgtggcgtgtgggaaaccgtcatgatgacctttgtctccggcttcttcggtttcgtgctcggcctgccggtaggcgtgctgctgtatgtcacccgcccggggcagatcatcgccaacaattcgctgtataagatcctgtccgggctggtgaacatcttccgttccattccgttcattatcctgctggtttggatgattccgtttacccgcatgatcgtcggcacctcgatcggcctgcaggcggccatcgtgccgttgaccgtgggcgccgcaccgttcatcgcgcgcatggtggaaaacgccctgctggaaatcccgtccggcctggtggaagccgcgcgcgccatgggcgccacgccgatgcagatcatcaagaaagtgttgctgccggaagccctgccgggcttggtcaacgccgcaaccatcaccctgatcaccctggtgggttactccgccatgggcggcgcggtcggcgccggcggcctgggccaaatcggttaccaatacggttatatcggttataacgccacagtgatgaataccgtattagtattactggtagttttggtttatctgatccaattctgcggcgatcgcatcgtcaaagccgttacccataaataatttcaccgcatattaatgcgagtctaatgaggaagggatatgtcgttaaaatttaaatccatcgcggcaattggcgcactgatcggcacgctggctctggcgggctgtggccaggatgaaaagaatccgaaccacatcaaggtcggcgtgatcgtcggcgctgagcagcaagtggctgaagtggcgcagaaagtggcgaaagagaaatacggtctggacgttgaactggtcaccttcaacgactacgtgctgcctaacgaagcgctgagcaaaggcgatatcgatctgaacgccttccagcacaagccttatctggatcagcagatcaaagaccgcggttacaagctggtgccggtcggcaacacctttgtttacccgatcgccggttactccaagaaaatcaaatcgctggacgagctgaaagaaggttcgcagatcgcgctgcctaacgatccgaccaacctgggccgttcgctgctgctgctgcagaaagtcggtctgatcaagctgaaagacggcgttggcctgctgccgaccgtgctggacgtgaccgagaacccgaaaaacctgaagttggttgagctggaagcgcctcagctgccgcgttctctggacgatcagcagatcgcgctggcggtgatcaacaccacctacgccagccagatcggcctgacgccggcgaaagacggtctgttcgtggaagataaagactcgccttacgtcaacctgctggttgcgcgcgaagataacaaagatgcggaaaacgtgaagaaattcgttcaggcctatcagtctgacgaagttgacgcggccgccaacaaaatcttcaacggcggagcggtgaaaggctggtaagcgcttattcacccattttattcctataattgcaagacgggccaaggcccgtcttgttatttccgccatagcttgcttcaatagcgccactttcattaaggcagaggaatctcaatgcgtgttttacctctctgtttgttagcggtcgcgctggccggatgttcatcgcagcgtatcgcgccgtcctcaacaagcagcaccagcaagccgaccaccaccgctccggccaagaccacgccggccgcccgccccgctccggtaaaactgtacaaaagtgcagaagagctcgtgggcaagccgttccgcgatctgggtgaagtgtccggcgaatcgtgccaaaccaccgtgcaagactctccaccgaatctggccaccgcccgtaaacgcatgcaaatccgtgcgtcttacatgaaggccaacgccgtgctgctgcacgactgccagattgtcagcggcgtcgccggttgctatcaacaggccgtttgtcagggctcggcgcttaacgtctcgtccaaatgaccgaattcgttttcgagcagatcggcgtgatccgctcgccctataaagagaaattcgccgtgccccgccagccggggctggtcgaagacggcggcggcgaactgctgctgctgccgccttacaaccaggcggaagcggtgcgcggcctcagcgatttcagccatctgtgggtgatgttcattttccatcaaaccatggagggcggctggcgcccgacggtgcgtccaccgcgtttaggcggcaatgcccgcatgggcgtgttcgccacccgctccaccttccgccccaacccgctcggcatgtcgctcattgagctgaagggcgtacgggtgaaaaacggtgaagtggcgctggaactgggcagcctcgacctggtcgacggcaccccggtggtggacatcaagccttatctgccgttcgccgagagccagccgcaggcccgcgccggctttgctcaggccgcgcccgccggcgatatgcccgtgcgtttcgcaccgcaggccgagcagcagctgcagcaacatcaggcgcgctacccgcaattaaggcgttttatcagccaggtgctggcgcaagacccccgtcccgcctatcgtaaaggagaggacatcgaacgggattacgccgtctggctgttggatttcaacgtgcgctggcgcgtcgtggacggccacaccgaagtgttggcgctcgacccgcgttaaaattccgccgcctctcttttggcgacccgctcgcgctggtaaactaaaccacttttgtcacttttggccgccactctggcagcccgatgcaatttgcagttctaacggaaccaaaacaccatgcgtactagccaatatctgctctccactttgaaggagacacctgccgacgccgaagtgatcagccaccagctgatgctgcgcgccgggatgatccgcaagctggcctccggtctttacacctggctgccgaccggcctgcgcgttctgaaaaaggttgaaaacatcgttcgcgaagaaatgaacaatgctaacgcgatcgaagtttccatgccggtggttcagcctgccgatctgtggcaggaaagcggccgttgggagcaatacggccccgagctgctgcgcttcgtcgaccgcggcgaccgtccgttcgtactgggcccgacgcatgaagaagtgatcaccgatctgatccgcaacgagatcagctcgtacaagcagctgccgctgaacttcttccagatccagaccaagttccgtgatgaagtgcgcccgcgtttcggcgtgatgcgttcccgtgagttcctgatgaaggatgcctactccttccacacctcacaggagtctctgcaggagacttacgacgcgatgtacgaagcatacagcaaaatcttcagccgcatgggcctggatttccgcccggtgcaggcggataccggctcgatcggcggcagcgcctcgcacgaattccaggtgctggcacagagcggtgaagacgatatcgtgttctccaccggttccgatttcgccgccaacatcgagctggcggaagctgtcgcgccggcagagccgcgcgctgcagccagcgaagagctgcgcctggtggatacgccgaacgccaaaaccatcgccgagctggtcgagcaattccagctgccggtggaaaaaaccgtgaagacgctgatggtgcgcgccaccgaagagagcggccataaactggtcgccctgctggtgcgcggcgatcacgaactgaacgaaatcaaggcagagaagctggcgcaggttgccgcgccgctgaccttcgccaccgaagaagagatccgcgccatcgtcggcgccggcccaggctcgcttggcccagtcaagctgccgatgccggtggtagccgatcgcagcgtagcggcgatgagcgatttcggcgccggcgccaacgttgacggcaaacactacttcggcatcaactgggagcgcgatctgccgctgccgcaggtggccgatatccgtaacgtggtggaaggcgacgccagcccggacggtcaggggacgctgctgatcaaacgcggcatcgaagtgggccatatcttccagctcggcaccaagtactcggaagcgatgaaagcgaccgtgcagggtgaagacggccgcaaccaggtgctgaccatgggttgctacggcatcggtgtcacgcgcgtcgtggccgccgccattgagcagaaccacgacgaacgcggcatcatctggccggacgccatcgcgccgttccaggtggcgatcctgccgatgaacatgcacaagtcattccgcgtgcaggcgctggcggaagagctgtacaacaccctgcgctcccacggcatcgatgtgatcctcgatgaccgcaaagagcgtccgggcgtgatgttcgcggatatggaactgatcggcgtgccgcactctatcgttatcggcgatcgtaacctcgataacgaagagatcgagtacaagaaccgccgcgtcggcgagaagaaaatgatcaaaaccggcgaaatcgttgatttcctgctgggccagatcaaacgctaagcgccgatcgccagagaataaaaaacccgcctaggcgggtttttttatatccgaaacgcgttacttgctgctgcagcttttactgcggtcgaacgcgatcttgccgtccggcaccaccgctttttcaatctgcccctcttccatcgacggctgcacgctgaagtgcgcgttgaaggtcaggaacaccggctcgccggcagtcttattggccttggcgtaaccttgctccagcgcgatgttgttatccaccgggaaagtgatgcctgtggcgcaatctttgaacaccgccgcgtcggccatatagctgtagctgcctttcatcaccatcggggttttaggcaacggcttttcgaccggctccagacggtaattcagcttggactcgatcggcgcgccgctgcgatccagcatctccaggctcttgcccaccggacggaagtagcgtttctcgccggtgctgtcggtcagcaccagcttatccgcggtgcgcgcccatttgccgtagtcggcaaaggtctgatcgccgtctttgctgccgcgataggtttcctgcagcacgaaggtgccgtcttcatccaggaacagcgccgtatccagaccgccgcaatcggcgcaaggcaacaccccttgataactctgcggcatcgcctgcagcggttgttccttcggttgataatgattgttgcatcccaacaacgagagtgcgcctgccgccaagaacagggctatcgtaattttcttcacagttattctcctactgtgttcatgtattcctaagtgcgaaccttgccgcgcagcgccttggtggcgcctttacgcgtcttgccttccaggcgacgcagtttcgctcctttcgtcggcttggtcgccttgcgcgttttttccaccaccatcgcctgctgaatcaacgcgaccagcctggccaacgccgcttcgcgattcaattcctgactgcgatactcttgcgccttgataatcaccacgccatcggcggtaattaaatggtgattcagcgccagcagcctttccttataatactctggcaggctggatgcccggatgtcaaagcgcaaatggatcgccgttgaggttttgttcacgtgctggccgcccgcgccctgcgcgcggatagccgtcaattccagctcattatccggtatggcgacgtttcttgacagttccagcaccggtcacacctgcgcccgctgccactcggcaaactggatttccagactattctgagcatcggacagccaaatagttccttcctgcagcgtcgcctgcagcgtcatggtgcggctggccagcgccgtcagccgcgccagctgctcgtcgtcgaggaagcgtacgctcaggttcttgtaaccggccactttgccctgcatcgcctgccaccaaacgtgcgcggcgcgctcgccgtaagcgtacaacaccacgcgcggcgactggttgcaggccttgcgaatgcgcttctcgtcaggcaaccccatctcgatccacatttccagcccgttatggtcgttgcgctgccagatctccggctcatcgtcggcgctcagccctttggtgaacaccagccgctcgtcggcatggcagatccaggccaacaggcgcagcatcatgcgctgttcattttcggacgggtgttgcgccagcgtcagcgtggcgtcgtgatagaagtgacgatccatatcagcgatattgaccgcggctttataaatggttgctttcagcgccatgggtgacctcgttgttattcggcgacagtgtacttgatcaggggtgaacgccgccagcgcagcccggctcggcgcagaacgaaaggcgtgtcggggtgctgataactccataacagctgtgctatagtcgtctaggataggataaaactccgagagcctgcgcctcatcgcgagagcggtcttgatgatgcagaggttcttaagggaggaaactgtgcaacaatactgtgagttagtacgccgtacttacgccgagattggcagtggagatcttggctacgtgcctgatgcgctggcttgtgcgttaaaggcattggacgatgtcgcagcgaacgacgcgctaccgtcctccgttagggaacaggcggcctttgccgccgctaacttattggtgagcgactatgttgatgaatgatgagtaccaacccatcaattgcgatgactacgacaacctggaactcgcctgtcagcataaacttattctgaagctggagttacgcgacggagaagtgatcgaggccaaggcgatcgacctgctgcaaaagaaacgcgttgagtatctgaccatcgaacagaacggccagcagcgcgacctgcggctggaccatatcagcagtttcagtcatccggaaatcggtaccgtggtcgtcagtctgtcggactgagcagcggtaaccccatcccaacagggcagcccaacggctgccctcgtcatttagggcttcaggctggcgtaataagccgccagatcggcgatatcgtcatccgacagccccgacacataggccttcatcacctcggcctggccgccgttgcgctcccctttcttatacgcctgcaacgcgtgctgcaggtacatggcgttctgcccggccagattcgggtacatcggcaccgtcaccttgccctgcgcgccgtggcacgccgcacaagcggcggctttggcctgaccggcggccgcatcccccgccgccaacgccggcaggctgaacaggccggcggccaacagcgtgatccccactaacttcatcagtgctcctcgcgattatgatttttttcccagcgcagccgccacgggcgttcgccttccggcacctgccccgcctcacagacgaatacgcccagcgcggcgatcagctgctcatcataataaatcaacgggatgcgttcacgctgccagggaggaatacccagctcctgccacagtttttttatcggccgcgaatgggcgcgccccacgatgcgcaccgcgccctgcacgccgccgaaacgaatgctaatctgctgcgatagcagcggcgcgcgcagcgccagatcgccctcaccggcaaccaacagccccagcccgtccggcaacgtcagcggctggtcaggccgccagggcagatgcacaccgcgcagcgccgccagcggcggcagcaggtgcagtcggccacggaaacggcggatctgataggcgccgagctgcagctgcggttcggcgtcttcccggctgagtgccacctcctcccacaggcgctgtagctgctcacgcgccggcatagtgacgttaaacaacgcgatccagcgccgcaacaaggcgaaacgccgtaccggcgaacagtcggtcaggccgtcgatcgccaatgagcgatccgccgccaacaggctttgcagcggttccgccagcagttcgtccagcagctgctcctgctcggcgcacaggctggcgctgcgcgccaccgccgaagcgaagtgcggccagcgctggttgagctgcggcaaaacctgcaaacgcaggaaattgcgatcgaagcgcgtgtcctgattgctgtcgtcatctatccagcttaaggcgtggcgctgcgcgtagctttccagcgtttgacgcgagcagcccagcaacggccgcaacagcaagtgctcgcccagcgtggcgcacgccgccatcgccgatagccccgccggcccgctgccgcgcttgagcgccaacaggaaggtttcgctttgatcgtcaaggtgttgggcggtaagcagcgcttctccctcaaccaatgctgcgctgaaagcggcatagcgcgccgcacgcgccgccgcttcgatgccgccctggcgggcatccacctgcacgtgcgtcaccgtcagcgggatccgccactcggcgcagcggcggcggcaatgctccacccaacggtcggcaaaggcgctcaggccatgatgcacgtgcagcgcacgcagctgcagcgccggacgttggcggcgcaacgtcgccagcagatgcagcagcacgctggaatccaggccgccgctgaacgccaccatcagccgctgctgcgcgcccagctggtccgctacctgcgtcgttaattgatcagtatccatcggtaggctttgtcacttctacatagctgcacgttaaccccgcctaccgccatcaatcaagcattaaccgtccgggcctggcgtcgcgtcagcagccaccagccgcccagcaccgcgatcaccgccagcgtgcacccggccgccccccagccgatctgggcgaaaatgcggccatacgcctgcatcgccgccccttcgatgtgatcctcggcggtctgattggcgatgatgcccgccagatagttggcgatcgaaccggtcgccagcatatagataccggtcaacacgccggtggcgccggggatattcagccgggtgatctgcgccatcgccaccggatcgataaacagttcggcgaagcccatcaccgccaggccggcgatcatcagccccatcgaacccggcccgtgcagccgcgtattgagcgccatcagcgtaaagccgacgccgatcaacagcagaccgaaggcgaacttgcaccagatgcgcagcgtccggtcgccagcgccaccgccgctcgtcagccaggccagcgccacgccgcccagcatcaccgcgcaggcgttaaccgactggaacagcgcggtcggcaccgtccagccgaaccagcgccggtcgacgaagtgatcgataaacaggctgatggagctgccgccctgctgggcaaaagcccagaacagcgtgcccagcagcatcagtacgatgatctgccacagcccccgccgctggccggcgtccgcacgcagcataatgcgcgccaccagcgccaccgccgccacgcacaccaacccgagcaaatagccggcccagtcgcgttcaaacagcagcgtgaagaacaacggcgacgccagcaacgccgccagcagccatccccagtgcggcaggcccaggcttctggcgcgcatcagcggggcattcacgccgcgggtgtggcggaaatggcgtccgcccagcagaaaaatcaccaggccggcgaacatgccgatcccggccaacgcaaagccgacgtgccagccatagcgctcggccgccaacccacaggcgatcggtgccaaaatggaaccgacgttgccggcggcgtacagcagcgagaagcccccttcgcggcgcgagtcctgcgccgggtaaagctcgcccagcaggcagctgatattggatttgaacaggccgtaaccgcagatgatgatcgccagcgccagatagagcgactgggcggagaccgcgctcaggccgagcacgatatgccccagggtcatcagcgccgcgccggcgatcaccgcgacgcggttgcccagcaggcggtcggcgagccagccgcccaaaataggagtgacgtaaactaacgaagcgtaagcgctgtagagatcgatggcgtggctgtcggtatagccgagttggtgggtcagatagaggatcagtaacgcacgcatgccgtaaaagctgaaatattcccaaatttgtatcgctacgacatagtagattgcgcgcggctgtgagggtgttttcatggtggtctcccatcagtcggtgaacgacaaaggggaagcgcgagcgcctcccctgtttttggctgcggttatttcgccttcagcactttcacccgataacgtccgtccgcctgacggtaggcgccgtgaatgtcggtttcaaagcccggataatgcgcgccgatttcgcacagcatctgcaggaactccagcaccggccggctctcttcggtcagcatctcgcccggcatcaccagcggcacgcccggcgggtatgggaggatcatgttggcgttgaccttaccgaccatctcttccagatagacctcttccacttcgccgtgcagctctttctggaacgcctgatacgggttcatcaccatggttggtagcacttcgaatgcgcggtacatcaggtccggcaggttgtgttgctccaccaggcggtgaatgttctgcgccagatcctgaatgcgcatgttttcatagaaatcaggcgcttcctgatacagcgaaggcagcatgtttttcacccgcaggttcaggtcgaacgaacgtttgaagtcggtcatcgcgcgcagcaggctgagcgccttggttttatcgatgccgatgctgaacaggaacagcaggttgtacggtccggttttctcgacgatgatgccgcgctcgtcgaggtatttcgccacgatgctggccgggatgccgaacggctgcatctcgccttccttgctcatccccggcgtcagaatggtgaccttgattggatccagatacatgtgttcattgtcgatgttcttgaaaccgtgccaggcgctgtcggagcgcagcggccagcattccggctcatcgatatgctccggctgccagacgtcgaagaaccagccgtcggactcgactttcaggcgtttgatctctttacggaacttgatcgcgcgttcgatagaaccgtggatcaggcgcttgccggcgttgcctttcatcatcgccgcagcggtttcggtcgaggccacaatgccgtagtgcggcgaagtggtggtgtgcatcatgtaggcttcgttgaaggtctcttcgttgatgtcgcccttcacgtggatcatcgacgcctgcgagaaggccgccagcagtttgtgggtggactgggtttcatagatcaccttgccctccacgcggccgccgctcatgccacacttgcctttatagatcgggtggaaattggtgtaaggcacccaggcggaatcgaagtggatagacttcacgtccagggtgttcttgataaagtcggtgttgtacagcaggccatcataggtggagttggtgatcaccgcgtgcaccggccaggtggcgttcggggtatccttcacgcgtttggcgatggtggcgcgctggaactcgctctgcggaataccgccgaggatgccgtaagcgttgcgggtcgggcggaaatagatcggcgtgatgtcgctcatcatcatcaggtgagtcagcgacttgtggcagttacggtcaatcagcaccgtgctgcccgccggcgccgaatacatgccgacgatcttgttggcagtggaagtgccgttggtgaccatgtagctgcgttcggcgttgaacacgcgagaaatatactcttccgcctctttgtgcgggccggagtgatccagcagcgatcccagttcagacaccgaaatcgagatatccgacttcatggtgttcgggccgaagaaatcgtagaacaggctgccgaccgggcttttctggaacgcggtgccgcccatgtggcccggcgtacagaaggtgtatttgccttcgcgcacgtatttgaacagcgccttggtcagcggtggcaggatggtgtcgatatattcgtcggtattctgtttgatcttggcggcgatgtcggttgccgcgccgagcgcatactcgaagaagcgcacctgcatgcgcagatcgttcaggctgacgtccagcgtcgaataggtgttggcgaaggcgtacagcggcatgtactcgttcagctggctgatctcttcgcacagctccaggttgtatttgtcccagtcgaagatcaccccgcacaagcgggcgttgttctcgatcagtttcagcaggtcttcgcgatcgttagggtaaacgatgcggaaatccagactttccagcgcctgatgcagttcacggataggctcttctttaaagtagacacccatgtgattcatgatggcgataacgttcatatgcatttctcctggcaaagcaagccccttcccgtcgcggctgacaggtcggaaagaaaggggctgggtaaattcagtcggtcagcggacgcgaatcagtgcgctttggccgtggtgttttcatcgaccgccgctgcgctggcagcctggcgggtattcattttccgggcgtagaacatcaggataatcaggctgatgataaaggtgccggacagttcgaaagagttggcgcccatcagcgcgatgaagcagaagccgcagccgcacacggaagcgatcaggctcagcaggttgcgcacgttgaccccttcaaagcggatcaggtctacgcaggagtagaagtaaggcagcatggtcagcagcaccgcgataccggtcagctcgccgaacaggtcggacgctttgccgccggcggagctcatcagggtgatcagcaccatcagcgcggtcattttgcaaccggccagcagcaggcctttcttcggaatgccgtttttatccagctcgccgtacactttcgggaagttgccgtcgttggcggcgcgcaccccggcctggccgaccagcatcatccacgaaccgagcgaggtcaggcaggcgaaggcggtgaaggcggaaaccatcggtgcggcccagttgcccataatcgccgaggcgctgatggcgaacggcgcgccgctggcggccatttcagacgccgggaacatgccgctgatcacctgggtggcggcgatgtagatgatgcccgccagaccggtgccgagcatggtcgccagcggtacggtgcgtttcgggtttttcaccatgccggtgctgaccgccgcggattccacgccgatgaacgcccacaggcacagcaggatacttttgatgaccgcatggctgtcggtggtgccggaggtattccagttagcctggtaggtggcggcgtcaaaccagtgccagccgagggtggcggtcacgatcaccgggatcagcaccagcaccaggcccagggtggtcaaacggctgacccaggttccgcccagcatgttaacgaaggtgaagacccacacgatggcgatacaggcgatgccggcgggcaccgggttgttcagcgccgggaagaaggtggagagataagaaacggcggtaatgccgatggccaggttaccgatccagttggcatggtaataaagcacgccggtctggaaaccgaaagccggggaaatttcaccggcgtaggcgatagggccgccctgctgtgggtttttggtggcgaggcgggcatacacataagccagcgacatcgccccgataatcgagatcacccatccccaaatggcgatggatccgagactcgccaggttggcgggcaataaggcaatcccgctccccatcatattaccggcgaccacgccggtgcaggcaataagccctattttcttgggtgaagccatggtcagtttctcctgatttacgtttcttataagccacgcccataaataaaagattttaatgagccggcttgatagtcaggatgctaaccatcggggggaataaagtcctaaagataaagtgagattacgctcatgatcatacaaatgataacctgaggttttttattaacacatcaagataaaaagacaggctaaagaaaagataaacatcatttaaaaacaaaaagatgacaaggttaataacgcataacaaatggcaaaaaagagataatatcgcgcagcaaaataatacattcatgcaacatgacttcaccaataaataacgccgccatgatccccgaagaataagagcggcgtgatattgggttaattattggcgctgatagttatttaaataaggcacgacgttggtcaatgacgtctggaatacgccattggtgatccaatgcaaggtatcctcaccggggcgaagattgaaggcggtaatataagagtcggccgccaaatgattctgcccctgcatttcatacaccttgcccagcagcacataattcagccacgacatttgcaattcaatccccagatcgatcgcccggtgcgcctcgtcaatgcgcccctgcgtcaaggcatctaccgccagaacctgctgcataatcggcgtgttcttcaattcggggatcgtcgccagatggctgatatcggcgcgcagttgccccaaggccgggctgtcgaacggttgataagaattgcgcagcagatccaccaacgctttttcagccagcagatagcggaagttcggcgcgctgttaatcagctcgctcagctgggcgctggcgcgggtcaacgaatcggcgtcaccgcggatcagcaactgatgcgcctggtagaaacgctgcagcaacggcccgttgtccggcagcaactgcgccagacgctgctccagctgtggcggccaaggctgcttcagcgccgcggacaggctggcgaggaagtcggtctggatcttcagctggttatcggcggtgatgaagtaacgcttgtccaacatgatcgaactgtcggcgttatccaccagccgcacggagaggaaacactgctgggcgcggtagtggcgctgattgacgaactcgatatacagcgacttgcccgagttgctggggccggaatagttgtagttggtctggtcgtgcaccaggaaggtcgagtaagtgttcaacgaatcggtaatcagctcgctgacgcccaccacataagagagctgcggcatccagttgctgcagctctcgccgccctgaatgcggatatcgatatcgcgcgggttgagcagcaccggcatggtcgataccggcacgcgctgcgacaacgtggcgatgccgacaaacgccacgcagacgcttagcgcactcagaaacgccagccacacccagaacgtcgagcggcgataaaaatgtggcttcttctcgccgggcgcggcagccggcacgcttgcccggcgcggcggcacatagggcgtatcctcttcatcatcgctgccgtcttccggctcatgcatgatcaccgcgatctgcggcgccggtgcaatcgcgggttgtgtctccccctcttcacaccagatcaccgacgtcgccagcttatacccgcgcttgggcacggtgataatgtattccgggctatcgctgtcgccgtctttcaggtacttgcgcagctctgaaatacattgggtcaccacgtggttggtgacaatattgcgcttccagacgttgtcgatcagctcgtcgcggctcagcaccacgtcggggtgccgggcgaaatagcacagcatgtcgatcaggcgcggttccagcgttttctggcgaccatcgcggctgatggtgttgtcggcaggagtaaccagccactccccgacgcgaaaagcaggctcttgcatggcggaaataactctgtaggcatgtagggcaagggcgcgatcatagcataaccgcccccggctgtggccgccgggaggcgattaagccgttaactctcgtataattctaacggtaaaccatcgggatcgctgaaaaaggtaaagcgggattgggtgtagggatcgacacgcaccggttcgcaggcaacgccggccgcctgcagatgagcgatagcctgatcgatgtcgtcgacgctgaacgccagatggcgcaggccgcaggcctccgggcggctgacgcgagccggcggcgaggggaaagaaaacagctcgatggtgtattgcccgttgagcgccagatccgctttccaggagccgcgctcctcacggtagacttcgctcagcagggtaaacccgagaatgtcgcagtaaaaacgcttgctggcggcgtagtccgcgccaatgatcgcgatgtggtgcacctgacgtaatgccagcatagaaaccctctcctgttcattctgatggggcacggtatccggcggcggcaatgccgtcaatgaaaaagcccggcttatcttgccaaaccgccgggcgcgttatggccttatgtctgcggggctttcagcaccttcaccagatagcacccgtcttccgtcagtttggcgccgtggatatcggtttcaaaaccgggatagcgctcaccgatcgagcatagcatcagcaggaaatcgagcaccgcccggctctcttcggtgatcatttcccccggcatcaccaacggcacgcccggcggataaggcaggatcatattggccgccaccttgcccaccagctgatccagctcgcaggtttcgacattgccgcgcacctgctcctggaacatctggtgcggcgtcagcttcatttccggcagcacgtcgaacgcccgctgcatcaggcctggcagatcgtgttggcggatcaggcgatgaatgccggcggccagatcctggatgcgcatatggcgatagaaatccggatcttcggcgtacagatccggcagcatgttcttcacccgcaggttgagatcgtaggcgcgcttgaagtcggtcaggccgcgcagcaggctcatcgccttggttttatcgatgccgatgctgaacaggaacagcaggttgtacggcccggtcttctccaccacgatgccgcgttcgtcgagatacttcgccaccagcgccgccgggatcccctcttcctccagcgcgctcagctcattcatgcccggcgtcaggatcgtcaccttgatcggatcgaggtacatatgatcgcgatcggtctggccgaaaccgtgccagttatcgtccggatccagcggccagcactgcgcctcatcgatctcttccggctgccagatatcgaagaaccagctgtcgctttcctcgcgcagccgctgcacttcacggcgaaaatgcagcgcgcgttccaccgaacggttgatcaaacggcgccccgggttgccgcgcagcatggcggcggcggtctccatcgacgccacgatgccgtagtgcggcgaagtggtggtgtgcatcatgtaggcttcgttgaaggtgctctcatcgtagtcacccttgatatgaatcatcgaggcctgcgagaaggcggccagcagcttgtgggtggattgggtttcgtagaaaaccttgccgggcacccgctcgccgctcatgccgctcttgccgtcgtaaatcggatggaagttggtgtaaggcacccaggcggagtcgaagtggatcgacggcacctccagcgtctgcttaatgtagtcggtgttgtacaacaggccgtcataggtggagttggtgatcaccgcatgcaccggccaggtggcgttcggcgtcgcctgcacccgggcggcgatgctctcacgcgtgaattcgcgctgcgggatcccgccgaggatgccgtaggcgttgcgcagcgggcgcagatagatcggcacgatatcgctcatcatcagcaggtggcacagcgatttgtggcagttgcggtcgatcagtaccgtgctgcccgccggcgccgaatacatgccgacgatcttgttggcggtggaggtgccgttggtgaccagatagctctgctcggcgttgaaggtgcgcgcgatatactcttcggcctccaggtgcggcccggtatgatccagcagcgaaccgagctcggtaaccgaaatcgagatgtcggccttcagggtattggcgccgaagaagtcatagaacaggcagcccaccgggcttttttgaaacgcagtgccggccatgtggcccggcgtgcagaaagtgtacttgccttcgcgcacatagttgaacagcgccttggtcagcggcggcgtgatggtgtcgatatattccgcggtgtactgctggatgcgctgcgcgatgtcgtccgccgcgttcaggccgtactcgaagaaatagagcaccatgcgcatttcatgcaggctgacgtcgaaggtggagtgggtattgataaaggcgtacagcggcaggtattcgttcagctcgttgatctcgctgcacagctccaggctgtagtcgtcccagtcgaagatcaccccgcagatgcgggcgttggcttcgatcagcttcagcagatcaccgctgtttttggggtacaccagctggaatcccatggcggccagcgcagcgtggagctcgcgaatcggctcatctttgtagtagacgcccgtcgggcccatgatggcgatgatattcatcggcagctcctgtcagttaacggccaagtctctataacaccacgaaaatccggcggtgtgtagccaaaaaaaaaccgcccggaggcggtttcttgcagcgaagcacagaactcagcagtagccgtagttcatcagacgctggtaacggcggttgagcaactcttcgtcgttcagaccatccagatctttcagatcggccagcagctgcgcttttagcgcggcggccatcgccggcacgtcgcggtgcgcggaacccagcggctccgggatcaccgagtcgatcagcttcagctctttcagacgcggtgcggtgatgcccatcgcttctgcggccagcggggccttatcggcgctcttccacaggatggaagcacagccttccggcgaaatcaccgagtaggtgctgtactgcagcatgttcaccttgtcgcccacgccgatcgccagcgcgccgccggagccgccttcgccgatgacggtgcagatgaccggcacgttcagacgcgacatctcacgcaggttgcgcgcgatagcttccgactggccgcgttcttccgcgcccacgcccggataagcgcccggggtatcaataaaggtgatgatcggcatcttgaagcgtgcggccatttccatcaggcgcagcgccttgcggtagccttccggcgccggcatgccgaagttgcggcggatcttctctttggtttcacggcctttctgatgcccgatgatcatcaccgggcggccatccaggcgcgcaatgccaccgacgatcgctttgtcgtcagcgtaagcgcgatcgcccgccaactcttcgaagtcggtaaagatgtgtttgatataatccagggtataaggacggcgcgggtggcgtgccaattgggcaatctgccaggccccaagatcggcaaaaatcttgcgcgtcagctcaacgctcttttcacgcaggcgctgaacctcttcgtccagattaatatctaatttttcgtcttgacggctgactgcagtcagcgagtcaattttcgcttccagctctgcaatcggctgttcaaaatcaagaaaattcagactcatagcattcctattttagtcaaattccaagtccacctgctcattgcctaccaacgtccgcaagtcgatcaacaagcggtcggtgggcgtcacgcgccaggttgcgccaaaacgcagcttggctcgcgcatcttcccgttgatagtagagatgcactggaatcgtccccgatcgatggggttccaacgactgacggagacggttcaaaagctggtcatcaatttgcctgtcagtcagcgagatagcaagcccgcgagcgtatttttcccgggcttcactgatgtccattacctcgcgggccatcattttaagcccgccgctaaagtcatcaaagctgacctgtccactggcgataaggatacggtctttttccaacaaatgctggtatttttctaacgcttcggtgaataacatcacttccagacggcccgaacggtcatccagcgtgcagatgccgatgcggttgccgcgcttggtcaccatcacccgcgcggcgaccaccaacccgacggcggtagtcattttgccccgatccgtcgggtgcatgtctttcaaacgctggccaccggcgtaacgttcgatctccttcaggtactgggtgatcgggtggccggtcaggtacagccccagcgtctcccgttcaccgtccagcaccacctgctccggccagggcgcgatattggcgtaggattgctctacctgctccggcgcttccgccagcacgccaaacatatccacctggccgatagcttcggctttcgcatgctgatccgccgctttcaacgcgtcgccgagcgaattcatcagcgcggcgcggtgcggcccaaggcgatcgaacgccccggacatgatcagtttttccagaatgcggcggttcagtttcttgatgtcggagcgcgcgcagagatcgaacaggtctttgaagtaaccttgttcgccgctgttgcgcgcctcgataatcgcctcgattggcccttcccctacgcccttgatggcgccgatgccgtacacgatctcgccgtcgtcgttgacgtggaagtgatacaggccgctgttgatgtccggcggcaggatcttcagccccatgcgccagcattcgtccaccagccccaccactttgtcggtgttgtccatatcggcggtcatcaccgccgccataaactcggccgggtagtgggccttcagccacagcgtctggtacgacaccagcgcataggcggcggagtgcgatttgttgaagccataaccggcgaatttctccaccaggtcgaagattttcaccgacagttcaccgtcgatgccgcgcgctttggcgccgtcttcaaagccgccgcgctgcttggccatttcgaccgggttctttttacccatcgcacggcgcagcatgtccgcgccgcccagcgtgtagccggccagcacctgggcaatctgcatcacctgttcctgatacaggatgatgccgtaggtcggctccagcaccggcttgagcgactcgtgctgccactgaatgtccgggtaggagatctcttcacggccgtgtttgcggtcgatgaagttatccaccatgcccgactgcagcggccccggacggaacagcgccaccagtgcgatcatgtcttcgaagcagtcgggcttcagacgtttgatcaaatctttcatgccgcgcgattcaagctggaacaccgccgtggtttccgagcgctgcagcatgtcgaaacttttcttgtcgtcgagcgggatggcggcgatgtcgatcggttccagcccggtcttggcgcgccgggcgttgatcatctccagcgcccagtcgatgatggtcagggtgcgcagaccgaggaagtcgaacttcaccagcccggcgtattccacgtcgttcttgtcgaactgtgtcaccgggtggttcccttcggcatcgcagtacagcggcgcgaagtcggtgatcttggtcggcgcgatcaccacgcccccggcgtgtttaccggcgttgcgcgttaccccttccagcttgcgcgccatgtcgatcagcgccttgacctcttcgtcggcctcgtaaatttccggcagctgcggttcggcggcgaaggctttctccagcgtcatgcccggatccggcggcaccagcttggagatgcgatcgacgaagccgtacgggtgccccagcacgcggcccacgtcgcggataaccgctttcgccgccatggtgccgaaggtgatgatctgcgataccgcttcgcggccgtacatctccgccacgtgctcgatcacctggtcacgcttctccatgcagaagtcgacgtcaaagtcgggcattgagacacgttccgggttcaggaagcgttcgaacagcagatcgaactccagcggatcgaggtcggtgattttcaacgcataggccaccagcgaaccggcgccggagccgcgccccgggcccaccggcacgttgttgtccttcgaccactggataaactccatcacgatcaggaagtagccggggaagcccatctggttgatcaccttcagctctacgtccagacgctcgtcatattccgggcggcgctgcgcgcgcacttcaggatcggggaacaggaactccagacgctcttccagcccctctttcgatttgagcaccaggaagtcctcggtgctcatatcgccggtcgggaactgcggcaggaagtattcgccgaggcgaatggtgacgttgcagcgcttggcgatttcgacgctgttcagcagcgcttccgggatgtcggcgaacagttcgcacatctcgtcttcgctgcgcatgtactgttgcgggctgtagttgcgcggccgcttagggtcgtccagcgtaaagccgtcgtgaatggcgacgcgaatctcatgagcgtcgaagtcatcttccaccaggaagcgcacgtcgttggtggccaccaccggcaagccgcgctcagtggccagcgccaccgccgcatgcaggtagttctcttcgtcctgacggccggtgcggatcagttccagatagtaacagtccgggaaatgctgctggtagaaatccagacactgatccacctgcgcctggttgccgcgcagcagaaacttgccgacgtcgccctgacgcgcaccggagagcaggatcagcccttcgcgatgttcaatcagccagtcgcgatcgatagtcgggccggcggcgccgtagccgcgctgataggcgcgagaaatcagcagcgtcaggttctggtagccttcgttgttgctggccagcaccgtcaactgagccagttcatcgcccagctcttcgctttgcacatggaaatccgcgccgatgatcggtttgatcccggcgccgtgcgcgctgccgtagaatttcaccagcccgcacaggttggtgaaatcggtgattgccagtgcaggcatggctaacgcggcgactcttttcaccagcggcgccgtcttggccaatccatcaatcatggagtagtcactgtggacgcgcaggtgaataaaacgaggttcggccatctccagatacctgattgaaggggctcagcaggctgagcccgggttaatgctatcgtcgagccggtcaggctcgcagactacagcgccagcgctcttttcaccggcgcgaaactgcggcgatgatgctcggtggcgcccagcgcggccagccgctccaggtggaaggcggtcgggtagcctttatgctgcgcgaaaccgtagtccgggtactcgctgtccagctcggccatttcgcgatcgcgcgtgaccttcgccagaatggacgccgcgctgatctccgccacgcggctgtcgcccttcaccaccgcctgcgaacgcatcggcaagctcgggcaacggttaccgtcgattaaaaccatgtccggcgcgatatgcaacccggccaccgcgcgctgcatcgccaacatggtggcgtgcaaaatgttcagttggtcgatttccgccggttcggcgcgccccaggctccaggagagcgccttggcgacgatttcgtcatacagcgccaggcggcgtttttcactgagtttcttggagtccgccagaccgacgatcggctgcgccggatcgaggatcacggcggcggtgaccaccgcgccgaccaacgggccgcggcccacttcgtccacaccggcaatcagcgtggcagcgggatagataaagggttcaatcatgctttcgccagctccaacacagcctgagcggcctgttcgtccgcaccgcaacggatgctttggtgcaaggtaaggaaagtctgtttcagcgcgtcggtttccgggctctcttccagcagcggcatcacggcggcggccagtttgtccggcacgcagtcatgctgcaacagctcggtgacgatctcgcgccccgccagcagattcggcagcgaaacgtaaggcgtttttaccagcttctgcgccaaccagaaagtgaacggcttcatgcgatagcccaccaccatcgggcacttggccagcatgcactccagcgccgccgtaccggatgccagcagcgccgcgtcgctggcgatcatcgcttcgcgcccctgcccgttcagcaggtgtacggtcaaatccggtgcaacctcggccttgatgcgctcaaactgctcgcgccgtttggcgttgaccagcggcaccaccacttccagctcgggataacgggtgcgcagcagctgcgcggttttgaggaaatcggcgctcagcatctcgacttcggcgccgcggctgcccggcagcaaggccagacagcgcgcctgcggagcgatgccaagctgagcgcgcgccgccagccggtcgggctgcaacggcatggcgtccgccatagtgtggccaataaaccggcaggggacgttgaaacgatcgtaaaacgctttttcgaaagggagaaaggccagcaccaaatcggtggctttgcctattttgaaaacgcgcttttgtcgccaggcccacacggaagggctgacgtagtggatggtgcgaatgccgcgctgcttgaggcggccttccagcgtgatgttgaagtccggcgcgtcgatgccgacaaacacgtccggccgcagctcaccgaagcggcgggtaagatccttgcggatcttcaacaggcgtggcaaacgctcgagcacttccaccacgcccatgaccgccagctcttccatttcgtaccaggcttcgcagccttcggcctgcatcagcgggccggcgacgcctacgaaacgcgcgccggggatctgcgccttgagcgcacggatcaagccggcgccgagaatgtcaccggaggtttctccggcgaccagtccgatagtcaatggacgattcgacataactcagcgaatgatgccacgggtggaacgggtgaagaaatcgaggtattgctgcaccaccggctgttctttggccagggcttcgatttccgctttcgcttcatccagcgttttctcgctgcgatacaggattttgtaggcgttgcggattgcctgcatttcatccttgtcaaaaccgcggcgcttcaggccgaccgcgttgacgccgaacggcgtagcgtggttgccctgagcgatgacgaaaggaggcacgtcctgagcgacaccggaacaaccgcctaccatcacatgcgcgccgataatgcagaactggtggatcgccgtcatgccgccgatgatggcgtgatcgtcgatttccacatgccccgccagcgtggcgttgttggccagcacgcaagcattgccgaccacgcaatcgtgggcgacgtgcacgttgaccatcagcaggttgtcgttgcccactttagtcaggccggtaccctgcgcggtgccgcgatgaatggtcacgctttcgcggatgcggttgcgatcgcccacttcaacgcgcgtcggttcgcccgcgtatttcagatcctgattcacttcgccgatagaggcgaactgataaatctgattatcgcagccaatcttggtaatgccgttcaccaccacgtgggatttcagcaccgtgccggcgccgatttccacctgggagccgacgtagcagaaagggccgatatgcacgttggcgccgatcacggcgccttcttcgactatcgcgctaggatggataaaggcggtttggtcaatcacggattaagcctcccggctgcgggcacacatcatggttgcttcgcagacaattttaccgtcaacggtcgccacgcctttgaagcgagtcagaccgcggcgagttttctcgaaggtgacttccatgaccatctgatcgcctggcaccacagggcgcttgaaacgtgcttcgtcgataccggcgaagtaatacagctcgcccggctccagtttgccgacgcttttaaacgccagaataccggtggcctgcgccatggcttccaggatcaatacgcctgggaaaatcggtttgccagggaaatggccctggaaaaacggttcattcaccgatacgttcttcaccgcacgcagatatttgtgctcttcaaactcgaggacgcggtcgaccagcaagaacgggtaacggtgaggaagcagatccaaaatttctgcaatatccagagtatgagtgtcagtagtcaaaatactcttcctgtctctaaaaactgatggcatcaacaacacggcctgcgctgaccccaaaaggagatcatcatgcaggccgcaaattaacatctctttgcgcttttggtctcacgaccaacgcgtttcgttttgtacccgccagggcgggcggcaatgattagtcttttccgactttacgttcgacagctttcaagcgtttgctgatctcatcgatattcatcaccaacgcagcggttttacgccaaaccttgttaggctgcaacggaatgcccgaagagtataccccaggttcggtgattggtcgcataaccattcccattccggtaacaacaaccttgtcggcaatctccatgtgaccgttgatcacgctggcaccgccgatctggcagtagcggccgattttcaggctgccggccatgatcacaccgccggcgacggcggtattgtcgccaatcacgacgttatgtgcaatctgacattggttgtcgatgataacaccattcccgatttgggtgttatccaaagcgccgcggtcaatggtggtgcaagcgccgatttcgacgcgatcgccgataatcaccgtgcccaactgagggattttgatccactcgccgcgctcgttcgcatagccgaaaccgtccgcgccaatcacggtgccggactggatcaggcagcgctggccgatttcaaccgcatgataaattgtgacattcgcccacagacgcgttcccgcgccgatgcgtgcgtgtttgccgatgaagcagcccggaccgataaccacgttatcgccaagcaccgcacccgactcaatcaccgcgtttgccccaatggcgacgttctgccccagctgcgcttcaggcgagatcaccgcgcttggcgcgatatcctgcgctggtgccggcgtagtgtccatcagttgcgccatgcgcgcgtaggtcagataagggtttttaaccaccagcgccgcagcacggcagtgtggtaaatccgcttcggtaagcaccacggcgcttgcctggcaggaagacagctgctcttgatagcggctgtttgacaaaaacgtgatttggccaggctgtgccgaatgcatagaagcaatgccggtgatgacgagatcgccatcaccgtgcaattgtgcatccaactgctgcgctaaatcagccagtcgaattgaaagcatgtgttatttaacctgtttcagcacgtcagcagtgatatctttggaagagtctgcataggcaacggcgttggcgtcgatcaccacgtcataaccgcctttgctggcgacagatttcaccgcgtcctgaatacggctcaggatcttgttacgttcttccatctggcgacggcggttgtcctgctcgaaagcctgggctttctgagagaactgctcgcgttgcgccatcacgtctttttccaacttgctgcggtcgctggctttcatggtagcgccgtcacgctgcagacgttgcattttggtctgcaggctacgttccatgttctggagttcgcttgcacggcctttaaactcgttttccagctgtttagcgaccgcttcgcgggccggcagctgttggaaaatgctggagacgttaacgacagcgatcttatctgctgcctgaacgccagctgaagcagccattgctaaaccgaggcctgcggcacacaaccactttttcactataaactccttaccatcacccatttgtgtcatatgacactgaagtacacaatttgccagacttgtcccaccaaacaatgagaatcatctccctctgccggcgggcgcctggccattgcgattcttaataactgttatgcccagaggcgagacccgttaccaggtcttaccgatgttaaactggaactgttcggacttgtcgccttcgtatttcttgatcgggttggcgtaagagaacaccaatggccccaatggcgacatccactgcagcgcgataccggcggaagaacgaatattgctggccttgctgtagtccggcacgccgtacatcagcgtttcgtcggtattcttccacttggtatcccacacggtaccggcatcgatgaacagcgaggtccgcaccgagttggcgtatttctcgctgatgaacggcgtcggggtgatcagctccaggctggcgaccgccatggcgttaccgcccaccgcgtcatccgagctacagatgctctgacgcgaggtcgtgctgccggcgttgaactgacactggtacgagttggagttgtagtacaccgccttcggaccaatggtgttggactggaagccgcgcacggtgctcgaaccaccggcgtagaagttctcgtagaacggcatttccttgccgcccaacccatccgcgtaacccagacggccacggcccaacagcacccaggtgcgatcgtcgttgatcggcacgtactgtacgctgtccagcgtcaccttgtagtattcgttgtccgagcccggaatggtgaccttaccgttcaacgtggtgcggttacccgaggtcgggaagtagccgcggtccaggttgttgtaggtccagcccaggttcagcgtaaagtcgtcggtcgagtagctggcgcggtcggttttgttcgcatccacgcccatcgagtcgaggtaacgccacatggcgatctgcggctgcatgttcgacaggccgttgtggacgtagcccaggccggtacgcaacgagttgttttcgttgatcgggaagcccagcgtgccgtcgataccgtaactcttgttggtatagtccgacagatccgcgtcatccgccttaaagtcgttgtagaagatgcggccgcccaggctcacaccgtcaacggtgaagtacgggttggtgaccgacagttcggtataggtctgatagtcgttcttggtgccgctgatgccgaccgagtacccggtacccaaccagttatcctgctgcacgcccgcctggaagctgacgccgctctcggtgccgtaaccgacgccgaagttgaaggtaccggtgttgcgttctttcaccttgtaggtcacatcgacctgatcggcggtgcccggcacgcgctgggtttccacgtcaaccgtttcgaagtagcccagacggttcagacgctctttgccctgctcgacctgctcgttgccaagccaggcgccttccatctggcgcatttcgcgacgcagtacggaatccttgctggtgtcgttgccttcgaacttgatgcgacgcacgtagaagcggttgcccgcgtcaacgttgacgtgcagtttgacggttttatccgcgtcgttgatctcaggctgagtgccgacgcgcgggtaggcgtaaccataacggcccaacatcgttttgatgttgtcttccattttggtcaccttgctgccgttgtacagctcgcctggctcgattttggtgatctgagcgacttccgccgagtggccggccagattgccgttcacgacaacatcggaaagcttgtactgctcgccttcggtgatgttgatggtgatgtagatgccttttttatccggcgtcaggctcacctgggtagaatcgatgttgaagcgggcatagccgcgatccagatagaagctgcgcagggtttcgagatcgcccgccagtttttgcttctggtatttgcgatcgccgaccaggttccaccatggcacttcgtcacgcagttggaagcgtgagatcagttcgtcgttggtgaaggcatggttgccgacgatgttgatttgttgaatcttggcggagaccccttccgtgaacaccagcttcaggtcgacacggttgcgcggcaacggcgtgactacggctttcaccgaggcgctgtatttaccgacgctgtagtagaagtcttccagccctttttcaatgctggagatcgtggtgcggtcgagcgcctcgcccacccggacgccggaggcttccaggttctgcttgagcatgtcatccttcaccgacttgttgccggagaaagtgatgctggcgatggtaggacgttccttcacctgcacgatcaaggtattaccatcgcgcagcacgcgcacgtcctcgaagttgccggtggcaaacaaggcacggatggtattactgatgtcatcgtcagtgacggtatcgccgacgcgaaccggcatgttgagtaacgccgcaccgacggcgactcgctgcaggccttcgaaatgaatgtctttcactacgaacccgtctgcaccgtatacggtggcgctgccaaacagcagcgacgctatgagcaactttttcatcgccatcgttgttatgcgttcttcctaacctatccccgcccctagaggcgggaaaaatcattgaaaagtgcaagacccatcaacaacaccagcacgatcgaacctatgcggtagctgtagtcctgtactcgctcggaaaccggcccacccttcagcttttctatcgccaggaagaggagatgcccaccatctaacaccggtaatgggaacaggttgatgatacccaggttgacgctaatcaacgccaggaacatcagataatacacgaacccgactccggctgacgccccagctccctgtgcaatcgagatcgggccactcaggttgttcagctttacatcaccggttattaatttgcccagcatgttgaccgtcagccgcatcagctgccaggtcttgtcgccggcctgatacagcgccgggaacggtccatactggcgaatcgttttatactcgtccggcagcggcagcacttttggaatgatgcctgcaaaccccaccgatttgtcttttcccaccggctttgtatccggtatcagcgtcaaagacaagggggcaccgtttctttcaatctccaaagccagcggttgccccgggccatcgtggatacgcttcaccagcgtctgccaacgacccaacggctgaccatcgactttaacgatcctgtcccccgcttgtaaacccgccttttgcgccgccgagttaggctgcacttccgccaacacggattcgatctgcgggccgcgcggcataatgcccagcgcgacaacgggatcctgcttgtccggttcaaagttccactggcgcaagtccagggttttggtcaccacctgcgaagagccgaacggcgcgacgccgacctcggtttgcacatcgccaatcttcgccaccagcgccagacgaactgactcccaatcaggcgtttcgatgccgtcaaccgactttagttccatgccagacgaaatttcggccttggcggcgatggattgcggcgcgatttcgccgatcaccgggcggaaactcggcacgccgatgatgaacaccaaccaataggcaaggatagcaaacaggaagttggcgatggggccggcgctgatgatggccgcgcgctgccagacggttttgttgttgaaggcctgatggcgcatttccggcgccaccgactccacgcgctcgtccagcatcttcacgtagccaccgagcggaatcaaagcgatgacgtactcggtgccctggcgatcggtgcggcgccacagcgcccggccgaagccgatggagaagcgttcaacgcgcacgccgcaacgacgggcaacccaaaagtgtccgaactcgtgcacggtaatcaaaataccgagcgcaatcagaaacgccaccaggttccaaagcacgctgaccatcatccctcactttccgtcattgacggattaaaacaccaacagcatcaggcaggcaaacacaggcaccgccgcggtcaggctgtcgatacggtccagtatgccgccgtggccgggaatcaaatgaccgctgtccttgatgcccgcttcgcgtttgaacatgctttcggtcaaatcgcccagcaccgaagccagcgcggcgatcaccgaacaggccagcagcgtggtcggcaccacgttcagcggcgcgtagcggccgaacagccaggaaatgaccgccgatgtcagcagcccgccgatcaacccttcccaggttttacccggcgagaccttcggcgccagcttatgcttgccgaacagcttgccgaacatataggcgccggaatccgcgccccacaccagcagcatcacgtacagcagccaccaggcgccggtaaacgggttttgctcatagccgaactggcgcagcgccagcatgccccaaaaaaacggcacgatggtcagcaggccgaacagcaggcgtagcgggcgcgaattgcgccagatggcggccgagccggggtaaaacagcaccagcagcagcgccgccagccaccaggccagcgacagccacagcgagccgcttacctgcggcacggattgatggtaggcgggaacgctgagcatcatcagcgccagcagaaaaccgcacagtatcgccagccagatgcgctgcgaacgggaggtaaaaccggccagttggccccactcccaggctgctaacatgcacacgacgagcgttaccagagcaaaggccagcggcggcaacaggaacagcgccgcgataacgatcgggattaaaatcagagcagttatgaggcgatacttcagcaaaagttctccctaggacgcatcggcgccgataggtgttgttcccccgaagcggcgctcacgttgtgcaaatgcattcagcgcaccttcaaagacaagttcatcgaaatcaggccagagcacatcagtaaagtaaagttcagcataggcgatttgccacagcaggaagttactgatgcgatgctcgccaccggtgcggataaccagatccaccggcgccaggtcgctcatgcaaacccgttcgctcaataattcctcgctgatctgatccgggtgcaactccccgccccgaacctgctcggccagttcccttactccctgaatgatatcccaacggccgccgtagttggcagcgatattgagcgtcaggccatcgttattttccgtcagtgcttcagagcggcggatccgctcctgcaaacgcgcgctgaaccggctaatatcgccgatcacccgcagcctgacgttatgtttatgcaggctttttacttcactatccaaagcgcggacaaaaagctccatcagggcagaaacttcctgcaccggacggttccagttttcgctgctgaaggcataaagcgtgagtgcatctaaatggtggctggcggcaaaactgaccgcgcggcgaaccgatttcacccctgctttatgaccgaagacacgtaacttgccctgacgtttggcccagcgtccgttaccgtccatgataatggcgacatggcgcggccccggggaagatggattagcctcttgttggtttgcggacgacataactcgtacttatttcctcaatagaaatataactgcctttccggaacatcagacccttacgcgcaaaaaaagccgtgtgcccgacacggctttcagcctgccctcgcgatacccgacgcagccgggtcgccattggcgcacaaggcgccaatcgagccataattcaacggtataaccgctgacaggtggcgcagactataccacctcagcggggcatgaacaaacggccccgcggcggcacgcgcgaattacgagcaaaatcggataatcaccgtgatcggccgcacaacgtgcgaacgcgttcctcggcggcggcgcgcgcctggcggtcaatgtctaagaccgcttcgatgctggtcggttcctgcagcgcgagacgctccaccacctggcgattgaccgccgcaatgtcggtaaagcgaatctgctgctgcaaaaatgccgccacggcgatttcattggccgcgttcagcgcggtggtcgccgcctggccggcctcgaacgcttcgatcgccaaatacaggcaaggataacgttcgcgttccggttcagcgaaggtcagcgaaccgatgcggcagaagtccagcgcttccacgccggagttcacgcgctgcggatacgccatcgcatgggcgatcggcgtgcgcatatccggcgtacccaactgcgccagcacgctgccgtcggcatagcgcaccatcgagtgaatcaccgactgcgggtgcaggatcacttccatttgctcggccgaggcgttaaacagccagcgggcctcaatgtattccagacctttgttcatcatggtggcggagtccaccgagatcttgcggcccatcgaccagttcgggtgggcgcaggcttgatccggcgtcatcgcggcgaactgttccagcggcgtggtgcggaacgggccgccggagccggtaagtacgatgcgcgaaacaccatgactgtccagtgaagagtatcccaactggcgctgaatactctcaggcaaactctgaaaaatcgcgttgtgctcgctgtcgagcggcagcagttgcgcctggctttgccgcaccgcgtccataaacaggcggccgcaggtgaccagcgactctttgttggccagcagcacctgcttacctgcgcggatcgccgccagcgtcggcaacagccccgcagcgccaacgatggccgccgtcacttgatcgacgtcgtccaaagccgccagttcgcaggccgcttgctccccggccaatacctcggtagcgacgccgttttccgccagaatggcgcgcagctcgcgggcggcgctttcatccgccatcgcggcgaaggcgggccggaattcgatgcattgctgcgccataaccgcgacgttgcggccggccaccaacgctttgatcgcaaaacgctcgggattcgccctgaccacggccagggtgctggtccctaccgagccggtcgagccaagaatggtcagttgcttcatgagttcactctgaataactgtctgatgagatcggaggtgctccagtgtggaaccttggacagcgcttgtccatgatctttcagtacgatgaaacgggatctgcgccacaaaaaacaaagcgccgcccaggcgacgctttttttctgcgcgatactgattagaaatccatcagctctttttctttctccgccaacgcggcgtcgaccagcttgatgtaagcgtcggtcattttctgaatctcgtcttgtgaacgacgttcttcgtcttcgctgatctctttgtctttcagcagcgccttgaccttgtcgttggcgtcgcgacgcacgttacgcaccgctacgcggccctgctcggcttcaccgcgtacgatcttgatcagatccttacggcgttcttcggtcagcggaggcagcggaacgcgaatgtcagaaccggcggaagacgggttaaggcccaaatcggagctcatgatcgctttctcaacggcctggctcaggctgcggtcgaacacgttgattttcagcgtgcgggagtcttccacggtcacgttggccagctgacgcagcggggtagcggcgccgtagtattccaccatgatgccgtccagaatgcttggcgaagcgcggccggtgcggatcttgctgatttggtttttgaatgcttctacgcttttttccatgcgtgaatcagcatcttttctgatttcattagtcacgttgcaaacccttggaagctggttacttggcaggcgatactcaagtatagcccgtaatcgtactcggagagcgcgcggcgcctggcgtcacgcgctccgaaaaggggtgtgaacagccttatttgctgatcagcgtaccttcgttctcacccatcaccacgcggcgcagcgcgccaggcttgttcatgttgaacacgcggatcggcagaccgtgatcgcgagccagcgtaaacgccgccagatccatcactttcagctcgcgctccagcacgtcctgataggttaattgttcatacagcgtcgcatccgggtttttcaccggatcggcggagtagacgccatccactttggtggctttcagcaccacgtccgcttcgatctcgatgccgcgcaggcaagcagcggaatcggtggtgaagaacgggttgccggtaccggcggagaagatcaccacgcggttgttgcgcagcaggctgatcgcctctgcccagctgtaattgtcacacacgccgttcagcgggatcgccgacatcaggcgggcgttcacataggcacggtgcagtgcatcacgcatagccaggccgttcatcacggtagccagcattcccatgtggtcgcccactacgcggttcatgccggcttgcgccaggcccgcgccgcggaacaggttcccgccgccaataactacaccgacctgaattcccagttcgaccagctctttcacttcctgagccatgcgatccaaaacgctggcgtcgataccaaaaccttctgcaccttgcagggcttcgccactcagtttaagcagaatacgctgatatacgggttttgcattggttgccatggtgttctgtcctaagaagcagtattagtattggggatttcagccgatgaaacgcgcctgaggtgagtatcacgctgcagggcttgccaccggtgtaattctggctggatagtatggaaccgccagacggcggttccatcgacagtcattaagactgtttgctcatcgcggcaacttcagcagcgaagtcggtttcgactttctcgatgccttcgcccacttcgaagcgaatgaagttggtcacgtcagcgttgtgctctttcagcacctgagcaacggatttgctcggatccataacgaaaggctgaccggtcagagaaacttcgccggtgaatttcttcatgcggccttcaaccattttctctgcgatttctttcggcttgccggactgcatggcgatgtccagctgaacctggtactctttttctaccacttcagcagacacgtcttctggcttcacgaattctggcttgctcgccgcaacgtgcattgcgatttgcttaaccagctcttcgtcagcgcctttagccgcaaccagaacgccgatacgcgcgccgtgcaggtagctgcccaacacttcgccttccagggaagcaacgcgacgaatgttgatgttttcgccgatttttgccaccagcgctacgcgctcttcttcgaactgtgctttcagcacgtcaacgtcagtgattttgccagccatagcggcatccagcactttgtcggcgaacgcctggaaaccggcgtcttttgctacgaagtcagtctggcagttaacttccagaatgatgccgtagttgccttcgatcttggttttgatcacgccgtcagcagccacgttgcctgcttttttagcggctttgatcgcaccggacttacgcatgttttcgattgccagttcgatgtcgccgttggattcaaccagcgccttcttgcaatccatcatgccagcgccggtacgctcgcgcagttcttttaccagggcagcggtaatatcagccatttctttttcctcggttatctcgcgtggagacagttctcattcagataagcaaagggggccttaacaggcccccctaaccaacatatgtcaatacctggttaataagggctcagtgacgagcttgccttattattcagcttctacgaagccttcttccgcctgaacggccagatcttgagaacgaccttcacgcacagcggcagcaacagcagtcaggtacaggtttactgcacggattgcgtcgtcgttaccagggatgatgaagtcaacgccgtctgggttggagttggtatcaacgatagagaataccgggatacccaggttgttggcttctttgatcgcgatgtgctcgtgatcggcatcgataacgaacagtgcgtctggcagaccgcccatatctttgataccgcccagggagttttccagcttggccagttcacgagtgcgcatcagcgcttctttcttggtcagcttgtccagggtgccgtcttgagactggatttccagatctttcaaacgcttgatggactgacgaacggttttccagttagtcagcataccgcccaaccagcggtggttcacgaagaactggtcacagctgttcgcagcgtcttttaccgcttcgcttgctgcgcgcttggtaccaacgaacaggatcttgcctttacgggaagagatcttggtcagttcagccagagcggcgttgaacattggtacggtctgctccaggttgatgatgtgaaccttgttacgagcgccgaagatgaaaggcttcattttcgggttccagtaacgggtctggtgaccaaagtgaacaccagccttgagcatgtcgcgcatggaaacagttgccatgattaaacctctatagattaattggggttatgcctccacgtatcccataacgccgaccctggcggcgacaagtcacctcagggcaccccggcggatgtgccgatacgtgtgtgttatttacacaaaatgagtgcagttaaagtattttcggccgattcccgccaggtcacaagaaccaagtcgcggatcgccggcgcgctttataccataaacccgccgccgacaccaacttttgttgcgtttcgccgggcgtcaggaaatgaaatttggcagcccccggccgggctgataccataagtcactgcttcttattgtcgacgataacgacacctgcggacgaatttcatggcaatctcaattaaaacacctgatgacatccaaaaaatgcgcgtggccggccgcctggccgccgaagtgctggagatcatcgagccgcacgtcaaacctggcgtgaccaccggcgagctggaccgtatctgtcacgagtacatcaccaacgagcagcaggccatctccgcctgcctcggctaccacggcttcccgaaatccgtgtgcatctcggtgaacgaagtggtgtgccacggcatcccgagcgacgacaaaacgctgaaagacggcgacatcgtcaacatcgacgtgaccgtgattaaagacggtttccacggcgacacctcgaagatgttcatcgtcggcaaaccgaccattctgggcgagcgcctgtgccgcgtcactcaggaaagcctgtatctggcgctgaagatggtcaaaccgggcatccgtctgcgcaccctgggcaaggccatccagcaattcgtcgaggccgagaaattctccgtggtgcgcgagtactgcggccacggcatcggcgaagtgttccatgaagagccgcaggtgctgcactatgacgcggacgacggcggcgtggtgctgcaggcgggcatggccttcaccatcgaaccgatggtcaacgccggcgactatcgcatccgcaccatgaaagacggctggacggtaaaaaccaaagatcgcagcttgtcggcgcagtatgagcatactattgtggtcactgataacggctgcgagataatgacgttgcgcaaggatgacaccatccccaacatcattacgcacgagatgtaagcactgcggcgcacgccgcgtgcagaatgtcaccaggccggcttatgccggccttttttatgggctgcgcactatgtctgacaatctccttcaaccggctgtgccgatgccgcccgcctctcccagcgtctacggcgacgacgagctcacctgcccgctgctgaaacagcggctggagcagttccagctgtggctggcggcggcgttcgacgccggatccagcgccgaaagcctggtggcggcgcgcagcgacttcatcgatcgcctgctgcgccggctgtggacgttctacggctttgaagatatcccggaaaccgcgctggtggcggtcggcggctacggccgcggcgagctgcatccgctgtcggatatcgacgtgctggtgctcagccagcgccggctgacggagcaacagtcgcagcgggtcggcgaattcatcaccctgctgtgggatctcaaactggaagtgggccacagcgtgcgcaccctggaagagtgtctgctggaagggctggcggatctgaccgtggccaccaacctgatcgaatcgcgcatgatctgcggcgacgttgcgctgttcctgcagatgcaaaaacatatcttcagcgacggcttttggccttcgccgcagttcttccacgccaagatcagcgagcaacaggagcgtcatcagcgctaccacggcaccagctataacctggaaccggatatcaaaagcagccccggtggcctgcgtgacatccacacgctgctgtgggtggcgcgtcgccacttcggcgccacctcgctggacgaaatggtcggcttcggtttcctcacccaggccgagcgcaacgagctgaacgaatgccagagcttcctgtggcgcatccgtttcgcgctgcatctggtgctgccgcgttacgacaaccgtctgttgttcgatcgtcagctcagcgtcgcgcagctgctgcgctatgaaggcgaaggcaacgagccggtcgagcgcatgatgaaagacttctaccgcatgacgcgccgcgtcagtgagttgaaccacatgctgctgcagctgttcgacgaagccatcctggcgctggacgccaccgaaaagccgcgcccgctgaacgacgatttccagctgcgcggcgatctgatcgatctgcgcgatgaaacgctgttcatccgcgagccgcaagccatcatgcgcatgttctacctgatggtgcgcaaccgcgagatcaaaggcatttactccaccaccgtgcgccagctgcgccacgcgcgccgccacctgaaacagccgctgtgcaccatcccggaagcgcgcgatctgtttatggccatcctgcgccaccccggcgcggtgtcgcgcgcgctggtgccgatgcaccgtcacagcgtgctgtgggcctatatgccgcagtggggcaagatcgtcgggcagatgcagttcgatctgttccacgcctataccgtcgacgaacacactatccgcgtgctgcagaagctggagagcttcgccgagcctgaaacccggccgcgccatccgctgtgcgtggagctgtacccgcgcctgccacacccggaactgctgctgctggcggccttgttccacgatatcgccaaagggcgcggcggcgatcactcgatcctcggcgcggaagacgtggtggagttcgccgaactgcacggcctcaactcgcgagaaacccagctggtggcctggctggtgcgctgccacctgctgatgtcggtcaccgcgcagcgccgcgatatccaggatccgacggtgatccagcagttcagcagcgaagtgcagagcgaaacccgcctgcgctatctggtgtgcctgacggtggcggatatctgcgccaccaacgaaaccctgtggaacagctggaagcagagcctgttgcgcgagctgtatttcgccaccgaaaaacagctgcgccgcggcatgcaaaacagcccggatctgcgcgaacgggtgcgccaccatcgcctgcaggcgctggcgctgctgcgcatggacaacatcgacgaagaggcgctgcaccgcatctggagccgctgccgcgccgattacttcctgcgccactcgccgaatcagctggcctggcacgcccgccacctgctggcccacgactccacccagccgctggtgctggtcagccgccaggcgacgcgcggcggcaccgagatcttcatctggagcccggatcgcccttacctgttcgccgccgtcgccggagagatggatcgccgcaacctgagcgtgcacgacgcgcagatcttcaccaaccgcgacggtatggcgatggacacctttatcgtgctggagccggacggcagcccgctggcgcaggatcgccacgcggcgatccgccaggcgctgctgcaggccatcacccagcgggagtaccagccgccgcgcgtacgccggccgtcatccaagctgcgccacttcagcgtgccgaccgaggtcaccttcctgccgacccacaccgatcgccgcagctacctggagctgaccgcgctcgatcaacccggcctgctggcgcgggtgggcgaagtgttcgccgatctggggctgtcgctgcacggcgcgcgcatttccaccattggcgagcgggtcgaggatttgtttatcctggccgacggcgagcggcgcgcgctcgaccaagaaacgcgcagaaagttggagcaacggttgacagaggccctcaccccaaacgataaaatgtgatacaagtaactttttaccgacaacatcaggaaagagaacagcatgcagcaattacagaacgttattgaaagcgccttcgaacgccgtgcggacatcaccccggcgaacgtagacaccgtaacgcgcgaagcggtaaaccaggtgatcggcctgctggacagcggcgccctgcgcgtcgccgagaagatcgacggtcaatgggtcacccatcagtggctgaagaaagccgtgctgctctctttccgcatcaacgacaataaggtgatggacggcgcggaaacccgctactacgacaaagtgccgatgaaattcgccgactacgacgaagcgcgcttccagaaggaaggcttccgcgtcgtgccgccggccaccgtgcgccagggcgcgttcatcgctcgcaacaccgtgctgatgccgtcttacgttaacatcggcgcctacgtcgacgaaggcaccatggtcgacacctgggccaccgtcggctcttgcgcgcagatcggcaaaaacgttcacctgtccggcggcgtcggcatcggcggcgtgctggagccgctgcaggccaacccgaccatcatcgaagacaactgcttcatcggcgcgcgttccgaagtggtggaaggcgtgatcgtggaagaaggctcggtgatttcgatgggcgtgtacctcggccagagcacccgcatctatgatcgcgaaaccggcgaaatccattacggccgcgtgccggcgggttcggtggtggtttccggcaacctgccgtcgaaagacggttcttacagcctgtactgcgcggtgatcgtcaagaaggtcgacgccaaaacgcgcggtaaagtcggcattaatgagttattgcgcactatcgactaaattgaaatagcgggtgattcacccgctatttttttgtctgcgtttcgctggcagtcacagtcgcagatctcgctttccgccataatcgcagtcgtggaatataacgatcacatctaaagagggcgcagtatgtacgataacttgaagagtttgggcatcaatcaaccggaagacgtcgatcgctatagcctgcgtcaagaggccaacaacgacatcctcaagatctatttccgcaaggacaagggcgagttcttcgccaagagcgtgaaattcaagtacccgcgccagcgtaaaaccgtggtggcggacaacgccggccagggctacaaggaaattcacgagatcaacccgaacctgcgttatgtaatcgacgagctggatcagctgtgccagcgcgatcaggtggaagtggatctgaagcgtaaaatcctcgacgacctgcgccatctcgaaggcgtggtgtcgcacaagattgccgagatcgaggccgatctggaaaaactcacccgcggcaaataatgcggatcggttgacccgcatcatcgccaaggcgcccttttgcggcgcctttttactttacgattgcagcagcgtgccccactgctcgacccacgggcaggcggccacttccggctccggctgttccatcgcatcgatctccagcacttcgccaacgcgggtggcgccctgctcctgcagcagcgcgtcgaacgcgcgcccggcgccgcagaagttgtcatagctgctgtcgcctagggcgatcagcccatagcgcagctccggctgatagccaacccgatcgcggatagcgtggaacagcggcgcgatgctgtccggcagatcgccctgcccggtggtggaggtgatcaccagcgcgtagtgctgacgataatactgccaggcctccagcgtgccctcttcgaacagtttgacctcatggccctgctcgctgaggatgttttgcgcctcttccgccaccagcagcgaattgccgtagaccgttcctacgaagataccaacctgagccatggctcctactcccttcattacctttaaaaattgtcagctatcctgaccgttagccgcgctaaactcaaccccggcaagttcagggaatagccccgcccagccgaactgcgccatcaccccttgccagtcttcgtcccagcgcgccgtcacctgcagcggttcgccggtcaccgggtgcgtcagctgcagatggctggcgtgcagcatcaggcgcgggcagccgaaatgctgcgccatcccgcggttctgccgcagatcgccgtgcttgctgtcgccgatgatcggatggcgaagatgcgccatatggcgccgcagctgatgtttgcggccggtttccggctgcagttccaccaggctataccgcgcgctgtcgtagcggccgacggccaccggcatctccacctgcgccaacggccggtagtgcgtcaccgccggctgcggccccttgtcggcatcggcatgtttatcggcgattttgtccagttccgccgtcagcggataatcgagagtcgccccctcctgcacgtaaccccgcaccaccgcatggtaggttttctgcacctgatgttgttcgaactgctgcgacagcaggcgcgccacctcgctggagagcgccatcagcagcacgccggaggtcggacgatcgagacggtgcacggtaaaaacgtgcttcccgagctgatcgcgcaccgtctgcatcataaagcgggtttcatgacgatccagccaactgcggtgcaccaaccaacccgacggcttgttcaccgccaccaggtgttcatcctgatacaaaatctcaatcacatcacgttcccaggtcaatagccgtttcgggcgcgagtataacaggcatgagacgcaacgctagttcacccattcgatggtcaccagccgcgtatcggcgcggccgcgctcgtccaccgcccgaatgcggtagcgcccgttgtcgataggccgccagtcgatcggctttttgctggcgctgctgccgagatagatatcgtcgacgaaccagtacaccgtcttgctgtcggcgtccgtcaccgcattgaaggcgattttgtcccgtccctgctgcgactggcgcagggtataggtggtgtttttcagcggtgaggtgatgcgcggcgcgttgccgccgacggcgatgccgttgtccttgcagcgattgatcggcggcgcccgcttcggcaacccggcctgagcgaacacattggccagatcggaaggccagaactcaaagatttcggtgcgggtctgcgccgcatcatacggcgggcaaacgacctcaccgctgtgaatatccagcaccaccggccggtaaacgctgtcgaccttgatcggcgacttgccgggaataaaccaggtcttgcccttttgctggcaccacggcgtcggcagatcgccgctggcgagacaaatgtccacccgccgcagccgtttggggaacggatgcttcggttcccgcaggccggggtaactggcgttgacgctgtcgatgatgttgaagaacagcggcgcggccgcctcggcgccgaccaacgcattgttgccgcgcccgtcgaagttgccttcccacaccaccagcacataagggccgaaaatcccgacgctccaggcgtcgcgaaagccccatgaggtgccggtcttccagtacaccggcagcgacgaagaacgctgcgccagcgtatcgcccggccgccggtgctggcgcagcatatccagcgtgatgaaactggcctcctcgctcagcagccgtaccggcgtcgattcggcctggttcagctgcatgcgcagcggccgcagctcgccgcgattcgccagcagcgcatacagcttcgccaattcctgcgccgttacctcgccgccgcccagcaccagcgacagcccgtagtggctctcgttggccatattggcgacgccggtcaggcgcaagaactgataaaaggttggctgacgcagctgcgaggcgacatagaccgccgggatgttacggctgaaattcagcgcgtcggtggcggtcaccgggccgagaaagcgccggtcgaaattttccggcgcataggccccaaacgacgaaggcacgtctttcagaatggtcatcggatgcagcacgccctgctccatgcccagcgcgtagatgaacggcttcagcgtcgatcccggcgagcgtttggcgttggtgccgttcacctgcccctgaatagggcgattgtaatagtccgccgatcccaccagcgcgcgcacccccatatcgcggctgtccaccagcagcaccgcggcgttctgaatgccgcggctgcggttgcgggcgataaaggcgttgacctgccgttcgaccagccgctgcaacccggcgtccagcgtcgtgtcgacgcgggtatcgcgctgcaccaattgctgcgtctgcaggcgcagctgttcgataaagtgcggcgcaatatagggcacttgttcaggctgccgcagcgccaacggcaggcggaacagcgtttgctggctggcgtcggtggggtaaacctgttgccagcgcaggaacagacggttgcgcgcctgcgtcaatgcggcgccgagcacgccggttttcggctccagacggtagctgggtgactgcggcaacaccgccagcgtcagcgcctccggcagagtcaactcccgcggcgacttagcgaaatagatcaggctggcggcgccgatgctttcaatgttgcggccgtagggcgcgtaattcagataggcttccaggatatcgcgcttggagtagctcagttccagctgcaccgcacgcagcacctgcagcagcttgccgcccggcgtacgggtattgagatgccagcgcatgcgcgccagctgcatgctgatggtcgaaccgccctgcattttgccgccggcgacatagctgcgccagaaaccgcgcatcaggctgacggggttaaagccggggttatagtagaaccagcgatcttcgtgcagcagcaatccgcgcaccgccagcggcgacacttgctccagcggggtccacagccggtagcgatcgtcgttggccagcgtaatgcgcagcagcgcgccgtgcctgtcgtaataaacggaagactgcggcagcccctgccacaggggcggatgcggccacagccgaattgcggtcaacagcagcgccagtaaaaacaccgccatcaagccgttttgcagcacgcgcccggtcaggatcttcatacgttctcagcattccggcgccagacgctggcctggcgccggatacgcctagtcgttgtccgccggcaccaccaccagcttgccgccgccggccgacatggcctgcacgtcacggtcgtacatggcttcgccgtaggccggtggaacaataaagctgccggtattggtggctttgatttgataaacgaactcctgcacctcagtgccggcgctgccgtagatgatcacccgatcttcgcggatatcgctgtagtccggcgcccaggtggagccagatgcggccagcggcgactgccagccgccatgctcgtcgctctcctcgcctgcgtcggccggctccggcggcgtctgctgcaccacttcgaacccgcccggcagcagatcgacgatcgccaggttgctctgcccctctttcgagttggcgcgcaccttcagatggacgttgatcttctgccccagcgtcacctgcgtcaccggcttgccctgttcgtcggtgtaatcgcggacgatctcaatcccgcgcgacagcgctttttgcggcgcattcagatcgtaaccggcctgcgtcaccacataccaggccggcgcgctgccgccgttggtgaagcgcacggcggtagcgtcggcgttaaattgcccctgaacgaacagcccctgcagctcgctgatgcgctgcgggtcgccgccgcttttgcccacctgcacgatgcctaacgcgtccgcattggcggattgcgccgccacctgggccgaatagctttccagcgccagaatgctcattgcagaggagtaggtggtgtaacgctcttctttcagtgccttgaccatattctccagcacctgcggcgggatcgacgccaccttctcagggaagtgacgggtaatcagatacagccgcgtcgcatcctgcaccagcggatcgaaatagttctgcgtccaccaggcgctgtcataggctttgctcagttgctgccagctcggttgcaacagcgcggcggcttcgtcgtccatcttcaacaggcgataggaagaggccagatagagtgcgctcagatcggttttccagccttcgccatagcgtttttgcagcgtatcctgcaccgccgccagcgagttggtggtcacttcgccctgcagcgtcagcaggtaaaccgcccagctgcgcaggcgcagcagatacagatcgtcgaatccgctggccgccagctcgcgcaacgcgccgttggcttcatccagcatgccttccggcagggcgtagcccgccgctttggcttcgagcagatactgcaccacataaggcgtgacgaaaggatcggcatccggcgacgaacgccaggcgccgatcgccccgctgtcattctgacgggcgcgcagcacgcccagcagattgcgcagctgcttgctgacttccgcctggctcaggctgcttttcatctccggatgacggctctgcagcatcagcggaatggagcggctgacgatctgctcggaacagtaatacgggtaatccgccaggtattgcgccagcccgctggtcagcaccagcggcgaattcgacaccgccgcccggcgctgcgcgaaggcgtcgaacatctggcgcaggccgtcgacgttctggctgccgccgctcatgcgccccatcaccgactgggtgcggtacggcgccgccggccgtaccgaggtgctgacggtgcggcggctggcctggtcgccgtaacgggcgtcgaacaccagcggcgcatcacccagcacggctttggcgcgcaggcggaaggtgataacgccttcacgtttttccgccagcgtcaggctttgcgtcgcgttgcccaccacctccaactgcggcggcggcgtcagcaggacgttgatggccaccgactggccgttcagcccttcgaggttgttgctgacgcccacgctgacgtcgaactcgtcgcccggcgccaccatcgccggcacattcggcgtcatgatgaagctgtcgcgcaccgtggcggcggtttgcgccttgccgattttctccggcgtcaccgaaatcgccatgacgcggatcttgccgttgaagtaatccggcaccggatagacgaactgtttctcgccgctgacctcggtaatgccggaccaataggccaccggcttatcgcgcttgcgcttgaacgggttgaggttgagatccagcccttcgcccgcatcgccgcccggcgccgcggtcagcgccatcagcttgctgaattccggcaggatcagatcgaggatctgcgagctgctcacgttgagttcgcgcttgctgaagaagaactccagcggatccttcagacggtaacgcgccacctgcagaatgccctcatcgacggcgaacagcgccacctgctgcggcgcatcggtcttgaccgtcatcgtcaggttttcacccggcttgatgacctccggcgccgtcacctcgaggctgttttggcgcgccttggtgctgatcttgaacggcatcacgccgtagctcagcgggctcatgaagatctcgctggagttgatgtcgcgcacgaactgcacgttgatgtagccgttgccctccatgccggccggcacgcggatcgtctgcaccgagctggtggtgtcggtgtggaaccactgccaggcgtaaaccttgtccttttcaatggtgatcaagccgctaccggtataaggcgcgttgatcgccacctcgatctcctcgcccggctggtattccgcctggttgagtttcagcttcagttcggcattgcgatccagcgaacggctcaggttggcgttgccggccacgctgtaggcgacgcgattgagcgtcttgccctgcgcatcttcaatcaccagcacgaagtcgcccggcttatcggtcgccagccgcagatccgcgccctgctcgctcagcgccagcggctgttccgacagctgcacttccttcatcttcgactggtatttgtaaacgcccgaatcctgtttggtcagcaccgaaatgtatttctgctcgatcaacacctgcttcaggttcggcatggcgatctgtttcagggccggatcgatagcgatcacgttcagatgccgctccgcgtcgcggttgatgtagcccagatcgccgtcggccttcaccccaatcaggtaatcgtaaggcgaaaccagcgtacgggtggtcgccgccaccgagcgcccgccgccggcaacgaacgcctccgacaacagctgcagctgataagtggcgtcggcgtaggatttcagatcgagcggaatatcggccgcgccgtgctcatcggtggtgcgatcttccagctcggtctcgaacccgtcgctgttttgccggttttcgtagaacgcataatccgggaagcgatcgaagctcggatacattggccgcagcgtcagcctggtggtcacacggcgatcctgcgccggggtgccgaacaagttctgcacatcgatgctggccttcagctcggacggttttacccagccttgctggcggtcaggcgtcaacgccagcttcactttcagctgatccggttcgaactccttcacattgactgcggtatggccgagcagcgtggaggtatcgttatttttgccgatcagatacagatagacgttccactcgccggtaggcgaattttcatcggtggtatagctcagctcgttgaaaccgctggcgcccagcgtcagcggcacggtggacatcagcttatcgcgcggatcgcggatttcggcgcgcaccggcacgccggccaggccaacgccccagtcggcggcgcgggtgatcaggccgatgttaaaggtatcccccggccgataaacgccgcgatcggagaacaggtagctgctgagcgtgcgcggatcggtcggcgtttgttcaccggcaacgtcgaagcgcgagaaatccagcccgcgatcgttatagctgccggtcggcaggaaggagacatccccttctttctccaccaggaacatcaccggctggcgctcgttggtgtacacatccagcgccgggaaacgcacgtgcccatcggcgccggtggtttggctgagcagcgtcacgccgtttttggccaccaccgacacggtggcgccgctgaccggcgcgccgctttggatcgactgcacaaagacgtcgcgcgtcttgtcctgcgagctcttggcgacgatgcccagatcggtcaccaccacaaagcgcgaatcgccgacgtcgggctgttcttccccttcgctctcatcctgttcctgatcctgctcggcgcccgcctcttccgccgccggttttcgattcggctgccattcagacagcgtcagcaggaacaccccgcgatgggaactggcgttggtggagagatagcgggaaagatcgatgccctgatagttcacttcccccggccgctcgttgttgagcgccgtctggtatttgaaatgctcggtgaaatactcgtcgttgagccggttgaattccgtggaggagtattcccggcttttgaaggagacgatatgctgcagctggctcgggatcacccgcttgatgtccagccgcaggcccgccacgttgcgcgccgccacgctgatctgcttgtcgccgttgaccgacagcagcgagccctgcgacatgaactgcagcgatttcgggaactccggcacttcgaccacgcggtaaaccttcttcggcattttgtaaccgccggcggaaaccagctggttatcgatctcgagcagcacaaagcggtgcgccggggcgtcgaaacggaagctgaactgcggttggtaggcctcttccgcctcgttaagcgtcaacggcagcgacgtcgcctgcgccagcacgtttttaccgacgctgtcgaccgtccattgatagaaatcgtcggcatcgttggcggtctcggcatcgctcggatcgcgctgcggcagcagccaggctttcgcggcccgcgccagctctttatccttcaccgcatcgctgaaaccgaccaccagggcacgctgccctttgccgccgtcggtgtccaccacctgggcgctggcgtcgctcagcgccaggctgtacagggtgggaaccttgacccagttgcttttcgcctcttcgaccgcgttgccggccgccgtcgatttaacgcccttgccgacggtcagatgtaccgcgccgccctgatccagcgcctgcagcggctcggaatgcacccaggcgttcagttttttctcgtcatagaccagagagaagttcagctttttctcggaggtggcgctgccttctttcaatcccagcgaaatctgtttttcaaagctgccgacgtcaaccggcgcgttgaactgcaaattgaagatcgcgctgcgtttttgcgcattttgcggatcgcggtaatactcggcctgccccaggcggtaatcgaacgcgggcacggtgaaggcataacgggttttgactagcttgacctgcggcgccagcaaggtggcgggttcaagggtcacctcatatttcgcgcccatcggcagcggctttttcgccgtgaacaccagtgtcgactcattgctccatgcccactgcccttccgccgacggtttcagagtgatgccggcgctcacggttttgcccgccgcggttatcggcgcagccgagccgctgaaggtcaggctcaccgtttgcggcgcctgccgggcggcggcgtagtctatcggctcggggttggacaactcggcgttgatctcctgaaccaccatcggcgccggttcaatcggttggggccggttttgccaccagtgccaaccgtaaaatgcgccgcccgcaacgcctgccagcagcagcaggctcagaccgaccgctttcgggtgtttatccacgccgctttccagccgcaaaaaaccgcgcggcagcgcagcccaccaggccggcgcacgccagctgaggttgccgaccagcggtctcagcaaccgccccaacagcgacaacgccccgcccagcaggcgacaaacgcccttaaccagggtaaaaggcaaacgcaggataaaccttaataaatccattattgcagcacctcatcatcctaatgcagctcccggtcaaccgccgcggttaaaccgagccgaaagacgccgtcggctctcctgcccggcatccgcgcgagtactctacactgccgggcggcaaaaatctgcgcgccgccggcgcattacggctctttattcaacatcaaatccagctgttgcagcagcaccagcagcggcagactgctcggttcacgatctttcaacgcctcttcgaaataaggcgtgatggcgaagcgcgtcggcaacggcgcctcggcgtccaacaacgcatacatgcgcggcaagaacacccactgcagccaggcttcggccgacatgctgtcgatgcagaacggctcggtgctggagaaagcctcatgctcagggggcgcggcctgccacagcgccagatcgcgcatggattgttcaatcgcctgcaaactgcggcgcacctggttatgtatactcatctgcattcccgatctcttttcatcatggtattcagcgctctggctgaaaggcggcaaagcatagcatttttatagcccaaattcggcgcgcctgagacagctcgccgtttttatctggtgacgttcgccgtcgcgcggcacaataggcccaccgaattcaccacacagataaagattcatgtccgtaataacagagaaaaaaaaccacgcgacgcccggtaaggccatgttggcctcggtcaccggttatgccatggacgggtttgacctgctgatcctcggctttatgctgccggccatcagcatcgaattgggattatcctcatcggccgccggttcgctggtcacctggacgctgatcggcgcggtgctgggcggcgtgatctttggccacctcagcgatcgtttcggccgcatccgggtactcacgatcaccatcctgatgttttccctgttcaccggcctgtgcgccgtggcgcaaggctattgggatctgctggcctatcgcactctggcgggcatcgggctgggtggcgagttcggcatcggcatggcgctgatcgccgaagcctggccggcggagaagcgcaatcgcgcttcggcatacgtcggcatgggctggcagttgggggtgctggcggccgctttcctgacgccgctgctgctggaacacatcggctggcgcggcatgttcctggtcggcctgctgccggcgctggcgtcattcctgatccgccgcacgctgggcgaaccggaggaattcgtgcggcagaaagacgccgggcagccgctttccttcctgcagcgtttgcgcctgctgtttaaggatcgcgccaccggcaaggccagcatcggcatcttcattctctgttcggtgcagaacttcggttactacgggctgatgatctggatgccgacttacctggcgaaaaactttggtttctcgctcaccaagtccggcctgtggacggcggtgacggtcgtgggcatgacgttcggcatctggctgtttggcgtgctggccgaccgcttcgcccgctggaagattttcgtgctgtatcaggtcggcgcggtggtgatggtgatcggctacgcccagttgagcgacccgatgctgatgttgttcgccggcgccgtgatgggcatgttcgttaacggcatgataggcggctacggcgcgttgatttccgatacttacccggtacaggcgcgcgccaccgcgcaaaacatcctgttcaatctggggcgcggcgtcggcggcctggggccattggtgatcggcgcgctggtgacgcaggtgtcgttcaccgccgctatcagcctgctggcggcgatttacctgctggatatctacgccacgctgttcctgctgccgaaaaaacagggcgcaggcgatacgctgggcgcgattggttaacgctggcgatggattaagcagagaagcacgcacggcgggatagaacaaaaagttgggggcactgcgttaacagtgcccccggttcgttttatagccatcccgctacacagcgtgctccctgctcaatccttgaaaacttttcctgcggccatcctgaccaagtggtccttgcatcatcctgcagcatcgtcctgacgcggttcctcagccttcctgacccgccgacagtcctgtgccggctctcaatctccgtcctggaggtgtccctggtttctatcctgaaacatcctgggcatctcctgacgccatccttcgctcttgcctgagcgcatccctttcttcgtcctgaagctgcatcatcctgatgctttcctgctccgccggttccgttccggtaacgataagatcgcttaaattccccggaatcacaagggtttgggaggcgtctcacactaaattaagcctaagagttatcctaaagaaattctaaccaattgatctggataacaataatctcatagtctggaaaaaggtgggaaaaattaagagcgatctctcacaccccgtgtgagagatctcttacacgggcgacggcgaatccgccgcgcttcagtccagcaccgggcgcagcgcatcgaggaaattccccagcgtcgccgccaacaaggtgcgcttatcgctgccgaattgttccagcaccacgttgccgctaacgttgcacagcgacaccatcgtcatctcggattcggtggtcgccaggaacagcgttggcgacagtttgagacgtttttgcgtcaccagatgaccgatcaggttctcctgcaggcggataaaatcctcctcgctccagacctgcagcaggctcaggcgatgctccccaaattgcgcgctcatgtcgcccgcgtattgctgcgtgtaaaaacggtgcgcatccggctgcaaacgcagctccagcgcggcttctaccctctccagcgtcgccgccggctcgaaaggctgcggcaaccacaacacctcgtcctcgcgattctccacgatgcagggcgacggcacgccgtacaatgcctggctggccggcgcgtggccgcgcgcttgctgccacaactcgacatagcgttgagtgaattcacgcagagcgtgcgatacatcatggtccatattctttctcgcatacgttaaactgacggccattgtacctatctctgagcgaggtgacagcagatgtcctcctatcaagaccaccaggccctgtcagggctgacgctgggcaaacccaccgcctaccgcgatcgctacgacgccacgttgctgcaggcggtgccgcgcagcatgaaccgcgagccgctggggctgtatcccgacaacctgcccttccacggcgcggacatctggacgctgtacgaactctcctggctgaacgccaacgggctgccgcaggtggcgatcggcgagatcagcctcaacgccgacagcctgaacctgatcgaatcgaaaagcttcaaactgtatctcaacagcttcaaccaaaccccgttcgccgattgggaaacggtgcgcagcaccctgcagcgcgatctgtctgcctgtgcccagggcgaggtaagcgtcaccctgttcagcgtcgagcagctggaaggcacgccgatcgcgcgtctggccggcgactgcatcgaccagcaggatatccgcatcgacaattatgagttcaacgccgactgcctgctgaacgccgccggtgaagaggtggtggaagagcaattggtcagccacctgctgaagtccaactgcctgatcacccatcaaccggactggggctcggtgcagataagctaccgcggcggcaagatcgatcgcgaagcgctgctgcgctacctggtctccttccgccaccacaacgaattccacgagcagtgcgtcgagcgcatcttcaacgatctgatgcgctactgccggccgcaaagcctgacggtttacgcccgctacacccgccgcggcgggctggacatcaacccgtggcgcagcaacgtcgtattcgctcccgcgcacggccgcctggcgcgccaataagtgcgaaacattgctcaacaactgagctaacgagcggtttatgttggtaaaagcccagggacggcggtaaggttaaaacgaggctgcggccgggcagagcgcccgctgcgccgcagcacgccaaccataacgagatgctgttttgctgcgtatggattactaccgccccgcaccgggtgcaaaggagttaccttgattacacacatcagcccgcttggctctatggatttattgtcgcagctggaagtagacatgctgaagcgcaccgccagcagcgacctgtaccgcctgttccgcaactgttcgctggccgtgttgaactccggcagccaaaccgacaacagcaaacagctgctgtcgcgctatgaaaccttcgacatcaacgtgctgcgccgcgagcgcggggtgaagctggagctggtcaacccgccggaagaggcgttcgtcgacggccgcatcatccgttcgctgcaggccaacctgttcgccgtgctgcgcgacatcctgttcgtgcacggccaaatcgccagcgccggccgtttccagcacctgaacctggaaaactcggcccacatcaccaacctggtattttcgatcctgcgcaatgcgcgcacgctgcatctggatgaagatcccaacatggtggtgtgctggggcgggcactcgatcaacgagaacgaatatctgtacgcgcgcaaggtcggcagccagctgggcctgcgcgagctcaacatctgcaccggctgcgggccgggcgccatggaagcgccgatgaaaggcgcggcggtcggccacgcgcagcagcgttaccacaacagccgctttatcggcatgaccgagccttcgatcatcgccgccgagccgcctaacccgctggtgaacgagctggtgatcatgccggacatcgaaaaacgcctggaagccttcgtgcgcatcgcgcatggcatcattatcttcccgggcggcgtcggcaccgccgaagagctgctgtacctgttgggtatcctgatgaacccggagaacagtgaacaggtgctgccgctgatcctgaccgggccgaaagagagcgccgactacttccgcgtgctggacgagttcatcatgaacacgctgggcgacgaagcgcgccgccattacaccatcatcatcgacgatccggcggaagtggcgcggcagatgaaaaaagccatgccgctggtgaaggaaaaccgccgcaacaccggcgacgcctacagctttaactggtcgatccgcatcgcgccggatctgcaactgccgttcgagccgacccacgaaaacatggcgaacctcaacctgtatccgaaccagccgccggagcaattggccgccgcgctgcgccgcgccttctccggcatcgtcgctggcaacgtgaaggaaaacggcatccacgccattgagcagttcggcccgtacaagctgcacggcgaaccacaaatgatgaagcagatggacagcctgctgcagggctttgttgcccagcaccgcatgaagctgccgggcagcgcctatgtgccctgctacgaaatcgtcgcctgaccctcaatcccgggcggcgtaacggccgccctgttttttctgaccttaccgcccatgatgatacacctactgattgtcgacgccctgaacctcatccgccgcattcacgccgtgcagggctccccttgcgtcaacgcctgccgccacgcgctgcagcagttgctccagcacagccgcccgacccacgcggtggcggtattcgacgaggacgaccgcagcgacagctggcgccaccaaattctgccggactacaaggccgggcgctcgccgatgccggaaaacctgcagcaggagatgccgcagctgcgcgaagccttcgccgagttgggcgtcgccagctggcattcgcccggcaatgaggcggacgatctggcggccacgctggcggcgaaggtcgccggcggcggccaccaggtgaccatcgtctccaccgacaaaggctattgccaactgctggcgccgaacgtacaaattcgcgattacttccagaaacgctggctggatatgcctttcgtgcaacaggagtttggcgtgcagccgcagcagctgccggactactgggggttggcggggatcggcagcagcaagatccccggtgtggccggcatcgggccgaaaaccgccgtgctgctgctgcagcagtcgggcagtctggacgggatctatcagcacctggagcaggtgccggagaaatggcgcggtaagctggagcagcaccgcgagctggcctacgtcagcaaacaagtcgccacgctgcgcaccgatctgtcgctggacggcaacctgcagcagctgcgcctgccgatacaataagggcgctgcaagcagcgcccttcatcaggtttaacgcggttaatcgcgctcgtcgcggcggcccggcaccgccgaccacatgcggcgcacgtgtacggtgatctcttcacgatcgtgatacagctgcttggcgtgcacttcagcgctgatgccggcggcgctcaacgcttcgcggatgttcatcaggttttgcgacacttcctcatagcgctttttcatcggcagtttgaggttaaagatcgcttcgcggcaccagcctttcaccagccactgaatcatcaggctggtcaccttcgccggtttttccaccatgtcgcacaccaaccaatagatcttgctgctgttcggctcgaacttgaagccgtcggcgcggtgatgcgttacctggccggtttccatcaggctcggcgccatcgggccgttatccaccgaatgcaccatcatgctgcgtttcaccaactgataggtccagccgcccgggcaggcgcccagatcgaccgcgtgcatgccgctggccaggcgctcgtcccactcgtcggcggggatgaacacgtggaacgcttcttccagcttcagcgtcgaacggctcggcgcatcggccgggaagcgcaaacgcggaatgcccatatagaacggtgagttgttgttgctgtaggagtaaccgacgtagcagcagcccggcgcgatgaaaaacacatgcaccaccgggcgagttgggttctcgcgcgccatcagcaccttctgctcgcgcatcgcggcgcgcagcggcaccgtcagcttgcggcagaatttcatcagctctttgctttcgttggtgtccggcacttccacccgcagctcgccgccgcgatcaaccacgccgatcagcatgccgacgatcggcgatacccgatcttccggcggcagatcgcgcagcagctcccccaccacgatcatctggcgggcgaaaatcagttcgcggaacggaatttcccgcgccagacggtcggcatcgtccggctgatagcattcgaacaacacgtaaccgctgtgctcttttacccgcgcaaagccgtaaatctccagctgggcggctttatcggtgatctccgccgcacactctttttcaaagccggggcggcagtacaacgcaatcttattcatggcgctcggcctttttcctcagacgcaaagcgccaatcaacatcaatatccagccgatcaagaagcacacgccgccaaccggcgtgatatatacccagaccttcaggtgcgacagcgccagacaatagaggctgccgctgaacaacacggtgccgaacgccaacagcgccccgctccagtaaaaccacaggctcacgcggcgctgcatcgcgaccgccagcgccaggatagccagggtgtggaacccctgatactccagcccggtgcggatccaggccatttcgttggcgcccagcgtgccgcttaacacatgcgcgccgaatgcgcccagcgcgacaaatacaaagccgctgatagcggcgaaaaccagcatggaacggctgctcatcgtgatctatcccattaaaaatcaccggccgcggcaaggcggcggccggccttattgttcgtagcggaagcggaacttctcttgttcgctggcggcacgcgccaggatccactgccggaaggcggctattttacccagttctgcctggctgtcatgacataccagataaaaagcgtttttactgaccaacacatcgttgaacgggcacaccaggcgaccggcttcgatctcggtttgcgccatcacgttattcaccagcgccacgccctggccgtgcaccgccgcctgcaccaccatggcgctgtggctgaagatcggcccctgctgcacattgatgtgttgcaaccccagctggcgcgtataggccagccagtcacggcgtgaaacgtcatgcagcaacgtatgataagccagatcgtctgcggttttcagcggatgatcgccggtcagcaggctcggcgaacaaaccggcagcagatattccgcatacaggcgctcggcgcgcagccccggccaattgccgcggccgtagaaaatcgccacatcgacgtcgtccgccagcttgtcttcttcgcggtccaccgcctggatgcgcacatcgatccccggataagctgagttaaagccggacaagcgcggcaccagccactgaatggcgaagctcggcggcagactgacggtcaatgcccccttggcgctgcgcgcctgcagcttgcgcgtcgcctcgttgatcgaagagaagatctccttgatatcgaggtagtaactttgcccctcttcggtcagcagcagcgagcggttgcgccgacgaaacagcttcagcccgaggaagtcctccagcgacttgatctggtggctcaccgcggcctgggtcacgaacagctcttccgccgccttggtgaaactcaggtggcgagcggccgcatcgaacacgcgcagcgcattgaggggaggtaagcgtttagacattaaattagctacttttgtgtaacattaatccgaatgattcggcgccgaaaatcgggcggctttgcgtggcaagccatcggtaaacgctaacggcgtattgccattagttttttttatccgagccattataatttgtccgttgaggatgcgccagcaaatacctatagtggcggcacttcccgggccggaacgaaaagggagtgggtgtcgaggacgccgatgaacttttggcttgtggttgtgatgttgtgtttgcaaattgtccggcgattccggacatggtagctaggctactgttttttcacttcctgtacatttaccctgtctgtccatagtgattttatgcagcaccgcaaaacttgcggtgcttttttttgcctgacggttactggttgctttcaaccatctctttcacatcggcgcggttgatctgttgctcgacgccgttggcgtctttatagctgatcatgccggtatcgttatccactttaggcttaccgtcagcgacaatggtgcgtccgtcattggtatgcatcacgtagttgctggaacaggcggccagggtgaacgtaagcatcagggcagagataactgcggctgttttcttcattgaggactcctttgtagttttaaatgctgataaataccttttatgtgtatagatgcgattaataagcgcacgtttaatagcataacaaactttaccaattttgccaggcgataagtcctaatcggcgcgaacgcttgtctccggcggcaaaataggacaggatcacccatcgactcaagccagtgacaatcagggtatgacgccttttaaccccagcctttttcgccaacagtttcccgcgctcgcgcaggacggcatctatctggacagcgccgccaccgcgttgaaaccgcaggcggtgatcgacgccacgcagcagttttatcgcgacgacgccgccaccgtgcaccgcagccagcatcgggcggcgcaggatctgaccgcccgtttcgagcaggcgcgcggccaggtcgcgcaactgatccatgcgccgtcggccgacgacatcgtctggacgcgcggcaccaccgaggcgatcaacctggtggcacagagctacctgcgcccgcgtctgcagccagatgatgaaattctggtgagcgaagcggaacaccacgccaacctgatcccctggctgatggtggcggagcaaaccggcgcgcgggtggtgaaactgccgatcggcgccgatcggttgccggacctggcgcagctgcccgccctgctcaatgacaaaacccgcctgttggcgctggggcaaatgtccaacgtcaccggcggctgcccggatctggcgccggctatcgcgctggcccatgccgccggcgcgcgcgtgatgatcgacggcgcccagggcgtggtgcacggcccggccgacgtacagcggctcgacatcgatttttacgccttctccggccacaagctgtatggcccgaccggcatcggcgcgctgtacggcaaagccgagctgctggcgcagatggcgccgtggcaaggagggggaaagatgctgatccaggcgtcgttcgacggctttaccccgcaaaagccgccgcactgcttcgaggccggcacgccaaacatcgccggcgtgctgggattggccgctgcgctcacctggctcagcgaacaggatatggcggcggcggagcgctacagccgcgagctggcggaccgggcggaacagcggttggcgcagctgccgggctttcgcagcttccgcagttccggttccagcctgctggcgttcgatatcgccggcgtacaccacagcgacatcatcacgctgctggcggagcaaggcattgcgctgcgcgccggccagcactgtgcgcagccgctgatggcggcgttaggcgtcagcggcacgctgcgcgcgtcgttcgctccctacaatactcaacaggacgtcgatacgctggtcagcgcgttaacttacgccctcgatctgctggccgactgacttgactcccggagacgctatgctcgccccccatccttttggccgagagatcacctccgacgcgttgatcgccaccttcagcgcgctgaaacagtgggaagaccgctaccgccagctgattatgctcgcaaaacggctaccgccgctgccggaagccttgcgcagtgaagaaatggcattgagcggttgtgaaaaccgcgtctggctggggcaccagttgctggaagacggcacgctgcacttctatggcgacagcgaaggccgcatcgtgcgcggcctgctggcggtgctgctgaccgaagtggaagggaaaacgccgcaacagatcgccgcattggatccgctggcgttgttcgaccgcctggcattgcgcgcgcagctgagcgccacccgcgccagcggcctggcggcgctggccgccgccgtaaaggcgatcgccgcccgttacgcctgacgcgccgccttcgccaccatctttttcagcgcgtgcgacacggcgacgaagccgaaggtggcggtaaccatggtcgccgcgccgaaacctgcgctgcaatccattcttttcggcccttccgccgtgctgcgcgaagcgcataccgagccgtccggctgcggataaaccagcggctcgctggagaagacgcagtcgatgcccagcttgcccttgccgtttttcaccacgttgaaatcgtgcttcagccgctcgcgcagtttggcggccagcggatcctgaatggtcttcgccagatcggccacttcgattttagtcgggtctatttgcccgccggcgccgccggtagtcaccaccgggatcttgaaacggcggcagtaggacagcagcgccgccttcggccgcacgctgtcgatcgcgtcgatgacgtagctgaagttatggtccagcagctcagcgacgttgtccggagtgatgaaatcatcgatgcaggtcacccggcattccgggttaatcgccaggatacgctccgccatcacctcggttttggattgcccgacatgctgacgcaatgcgtggatttggcgattggtattggtgacgcagacatcatccatgtcgatcagggtgatggcgccgatgccggtgcgcgccagcgcctcagccgcccaggaacccacgccgccgatgccgatcacgcagacgtgtgcctgcgcgaacaccgccagcgcctgctggccgtacaaccgcgccgtgccgccgaaacgctgcagataggcttccgaataagctgtgctcataacgctttaattaccttcgtaatgcaaatgataagggccggaaaatccggcccttgcgggtcaatcttttcacaccgcgcgcgtttaccgggtggccaacaacgaaccgccgccgtttgactgattggcgctgaacagctggccaccgccgttgttcttcagcacccagacgcggccgtagtggttgtagtaccccgccgagtggccggcttccggcccgatgccctgatacatgtcaaaatgctggcccttgatggcgccgcccacgtcgagcgcgaccatcagacgcatctcgtattttcccgtgaatttacccttgttgtccagcagcggcacttcggccagcagcgtggtgcccgccgggatcagcgaacggtcggaagccaccgaggctttggcgatcagcggcaccgcactggcgcctttcaccggcgcaaaagcttccgggcggaagaacacgaacgacgggttctgctccagcagctcacgcacctctgcggcgctgtgggtatccgcccactgacggatcgcctgcatcgacatgtccgccttggccacttcgccgcgatcgatcagcaccttgccgatgctgcgataggcgtggccgttcttgccgccgtagccgaagaacaccagcggctggccgttgccgtagtcgacataaccgctgccctggacttccatcatgaagttgtccatcagcgagttggtgtaagcgatgatatagcgatcgtcgagcgcgccggagtagatgcccgcgcgatccggcaagcggcccctgcccttcggcggcatgcggtacagcggatagcggaactcgccctgttgggtatagcgcgcctgcaccaccggcgtatagtagccggtaaactgcacgttgccgtaattgtcgacgccttccatctggtaagcgctgaggccgtactggctcagcatgcgcgtgtcggcgccggacgccatccagctttgcaccgcctgataggtgctgttgttgcggttaaacagcgaaggcgacgcgtacttgatctccatcagctgatccgagtaatccttggcgttgaccggcgaacctttggcgttgggctgattgaccagctccagcgattgatccagacggccgtccttatattgctgaccccgatcggtcggcttggacgaacagcccgccaacaccgccaccatcaacccgcccagcaggtatttgccccaacgtcctttcatcgcgcacactctcaaactgatatgatctaccggctgaacgataacaaacgctcattgataaaggaatcgctgcaaataaaaaaagccgcacggaggatggtgatgaaaaagaaggcaaattgcgggcaaattcagcagaaaaacgggtttagggcaataaaatgcaaaaagggtttgcaacaaaacgcatggagagtatagtgcgcatccatcggacgcggggtggagcagcctggtagctcgtcgggctcataacccgaaggtcgtcggttcaaatccggcccccgcaaccaaccgatgccgcattggcggtatttttcgtttggtttcgataacaaagtattacacggacgcggggtggagcagcctggtagctcgtcgggctcataacccgaaggtcgtcggttcaaatccggcccccgcaaccaaccgaatgtcgtaccagcggcataacatgaacggtggtttcgtcgtaataccgcatcaagacggacgcggggtggagcagcctggtagctcgtcgggctcataacccgaaggtcgtcggttcaaatccggcccccgcaaccaactcttgatgacaacagataagcaccctgacgggtgtttttttgtatctgcaatccgcgaaaatagccggactcgcgcccggccctgccgttatcgactcgccagcgcgccgccgttggcgaaataagccttgatgcccgccagaatcgactccgccacctgctgctggaagtggctggtgcgcagcttgcgctcctcttcgatgttgctgataaacgccgtttccaccaggatcgacgggatatccggcgccttcaacaccgcaaaaccggcctgatcgacgcgattcttgtgcaaccggttgattttgcccatccggttcaacacttccttgccgaatttcaggctgtcgttgatggtcgcggtctggatcagatcgaacatggtgtggtcgagatagcggtcgccgctcttgctgacgccgccgatttggtccgaggcattctgcgtctgcgccaggaacttggccgccgagctggtggcgcctttggtggacaatgcgaacaccgatgacccgcgcgcagcgcggctggtgaaggcgtcggcgtgaatcgaaacgaacagatcggcgcgctgcttgcgcgccttggcgacgcgcaccttgagcggaataaacacgtcctcattacgcgtcatgaacactttcatgttcggctcgcgcttgatcatggcgctcagcttgcgggcaatctgcagtacgatgtctttctcgcgcgtcttgtacttgccgatcgcgccgggatcttcgccgccgtggccaggatccagcatgatgacgatcggccgatcgcgccccgctttgccggcctgcggcgcttccggcggcagcgtgcgctccagatcgcccttgttgtaatcttccagtaacgccagtagcggatcatattcctcgccgctgccgccgcccttggtcggatagagatccatcaccagacggttgcgatactccggcaccggcgccagcgtgaaaatatgcgggctgacgctttgtttgagctccagcaccagccgcacggtattctgatcgaactggccgacgcgcgcctgcttgagataaggatcgtcggcgcgcacctgcccggcgatgcccttcagcacgctgttgaggtgaacgccttcgatatccaccaccacgcgatcgggattggtcagggcgaactgcttgtatttcagctcgacgttggattccagcgtgacgcgggtataggtggaggatggccagacgcgcacggcgatcacgtgcgatgatgcggcgaagcccgtacgactcacactcagcaaccagctggcggcaacgccctgtaataaacgacggcggcccagattgtgattagcgtttggcatgcggctccggcagtaatagctgtttacaacagatgaaaaaaacaccaatgaaatggggatgctgaaaactttaaccaatcattccacccctgtcatcagaaaatctttttatggtttttcaatttattaacgatttagcgcccttagcgcacgcttcatgacgatttcccacttgccatcggcgcaataaaagaataaaaatacaaaaatatcgtataaatatgcaaagaggtttggccgtgaaggaacgtagtacagagctggtgcaaggattccgtcactcagtcccctatatcaacgcccaccgcggcaagacgttcgtcatcatgctcggcggggaagccatcgaacacgagaatttctccaacatcgtcaacgatatcgggttgctgcatagcctgggcattcgcctggtggtggtttacggcgcgcggccgcagatcgacgccaatctggctcagcataactatgagccgatctaccacaaacacacccgcgtgaccgacgcccatacgctcgaactggtcaagcaggccgccggcctgctgcagctcgacatcaccgctcggctgtcgatgagcctcaacaacacgccgctgcaaggcgcgcatatcaacgtagtcagcggcaacttcatcatcgcgcagccgctgggcgttgatgacggcatcgactactgccacagcggccgcattcgccgcatcgatgaagaagcgatccaccgtcagctcgacagcaacgccatcgtgctgatcggcccggtcgcggtttcggtcaccggcgagagcttcaatctgacttcggaagaagtcgcgactcagctggcgatcaaactgaaagcggaaaaaatgatcggtttctgctcctcgcagggcgtgaccgacgcggaaggcaacatcctttccgagctgttccccaacgacgcgcaaaagcgccttgaagagctggaggaaggcggcgattaccattccggcaccgtgcgcttcctgcgcggcgcggtgaaaggctgccgcagcggcgtgcgccgcagccacctgatcagctatcaggaggacggcgcgctggtgcaagaactgttctcacgcgacggcatcggcacccaaatcgtgatggagagcgccgaacaggtgcgccgggcgacgatcaacgacatcggcggtattctggaactcattcggccgctcgaacagcaaggtattctggtgcgccgttcgcgtgaacagctggagatggagatcgacaaattcaccattatcgaacgcgacaacctgaccatcgcctgtgcggcgctgtacccgttcccggaggaaaaaatcggtgagatggcctgcgtggcggtgcatcccgattaccgcagctcttcgcgcggcgagatgctgctgcagcgggtggaaaatcaggcgcggcagatgggattgaagaagctgttcgtgctgaccacccgcagcatccactggttccaggagcgtggcttcaccccggcagaagtcgacgtgctgccgatgcaaaagcaggcgttgtacaactaccaacgccgttccaaaatcctgctggccgatctgtaatctccgcggcgcggcccttgccgcgccccttcaacgcttattccgttgcctgcagccgttcagccaatccgctgcggcgctgggtcggcatacgaatggcccgcagcagcaccgcctccgtggcatacagcgagagctgcttacgcgcgcgggtgatcgcggtatagaccaattcacgcgtcagcaccggcaggaagtgattcggcaacaccagcaccgtatggtcaaactccgatccctgagatttgtgcaccgtcatggcataggcggtttcatgcgccggcaaacggctcggctgcaccgacttgatgcttccatccggcagttggaaatgcacacgcagctcgccgcgctcatccggcagcgtaatgccgatatccccattgaataaccccagcgcgctgtcgttgcggccgatcatcaccggccgcccccgataccagcggccgagaacgcccggtttgcggtcgatcagaccggcgcgctgcagcccgagttcaatacgttcattcaggccggcaacgccgaaaggcccttcacgcagcgcgcacagcacctggaagcggctaaaggcggccagcaccgccgccgcatccgcaccttcggcagtcagccgcagatagtcgcgatagcccgccacgcaggcatccagcagcgcctgatactcttcgctcgtcgccagcgcatagcccgcgacatctccgaaactgccgcttaaggctgccagcgcgcgctccccggcaccggcgttaaccgccaacgccagttggccgatgccggagcgggcatcgaagcgatagctcttgcgcagcaggcataggctgtcacgcaccgccgcttccgcgtcggcctgccgcccttcgagcgaacagccggtcaggcggcttagctctgcagcacgcgcatcgctgtatccctgctcggcaaaacggcaaatgtcccccagcaccgcgccggcctccaccgaggccagctgatcgcgatcgccgaggaaaatcacccgggcccgatcgggcaacgccgcaatcaggcgcgccatcatcggtagatcgaccatcgaggcctcatccaccaccagcacatccaaatgcagccggttgccgcggtgatagcgcatgcgctgactgttgggttgcgcccccaacaggcggtgcaacgtcgccgcctccgtcgggaacaaggcctgctgcgccggggtcaacgccagctgacggctggcgctgccaagcgactccgtcaagcgcgccgccgccttgccggttggcgccgccagctgaatgcgcaagcgcgcgctttcatccaactgcaccagcgccgccaacagcttggcgacggtggtggttttaccggtgcccggcccgccggaaatgatcgcaatgcgccgcgtggcggctaccgcggcggcgatcttctgccaatcgggttcgtcgctcgccgaaccgaacaagcggtcgagaatagtgcgcagttcagcctccggcaccgccagcgactcgccttcgccgccgataaacgccgccacttcaccttcgttttgccacatgcgctgcagatacaagcgcggcccgcgcagcaccagcggcatagcgctactgccgtccccgaccgcagcgctggccgccaggcgctgctgccaacgctcgctatccggtcgcccggccgcctcccacagcgccagcgccagcgccggttggcgcccttcaaacagcgtatccgcctgcagctgctccagcatcagacagacgtgaccggcccccgcctctgcgctcaggcaggcggcggccagcaaaatatcgggctcgtcttcgttcgccaccacgcgggcgaactgcacgtccagcgggcgcaacacgccaagcgccaccgcctgctccagcagtgcgatcatgatccatcctccgtcgcagcagcctcgccgctgaacaagcgatccatccccgccaccagctcaaactcgggaagacaggtgaaaatgccgttgcccgggtgcgcctcatccacgccgcgcaggaacagataaatcaccccgccgaaatggcgccggtaatcgtaatccggcagccgatgacgcagataacggtgcagcgccagcgtatacagctgatattgcagatcgtaacgatgctccgccatcgcctgctccatcgccggccgggtataggcgctgctgtcttcccctaaccagttggacttgtagtccagcaggtagtatttgccctgccaacagaacaccaggtcgataaagcctttcagcatgccctgcacctgatggaaatccagcgccgggcagcgagcggaaagcggatcgtaacgcctcaccagagcatcgagatccttcgcctgcaacaactgattaatcggcaaatagaactgcaactccgcctgcttgtgctgcggcgttaacgccgccagcgtcacgccgctgccatcgagcggcgtgttgagtagcacctgcatccacgccagcagtatcggttgccagtgttcagcgaacccttgctgttgcagctgttccagcaaccactgttcgtcgagcggctgggtgaagtccaacgtttcgaacaggctgtgcaggaaggtgccgggcgtcgcgccgcgcgggaaggtatgcggtgtgagcgctggctcactctcctcactccgctcccccgcagcgtcgatatccagacgcggcagcagatcctgcatcaggctcgcgccgtgctgctgcaaaccggtatagctggtcacccgccaaaaatcctggatccgccgggtaaagcttttcgccgccagcgcttcggccaacgccgtctggggctgccaaggcgcctcgtccggcgattcaaccagcgacagcgcaatgccgccacccgccaattgctgcaggcgctcctgcagatacacggcgtcgccgggctgcccgccctgcaccagatagcccaatgcgctgcggtgcagatcggtatcgccctgcttcttgcgcgtgccctggaacaacggcgcgatgccgatgctgcagtggtacaccgagcgggtcagcgccacgtacagcagacgcaggtcttccgctaaccgctcctcctccgcccaggcctggctctcttcattggcgtcgaggtccagcaacgcctggaaactgtggcgatcgtgatacagcgcctgctgctgctggcggaagttgccgacgaacggcagccacaccagatcgaactccagccccttggacttgtggatcgtgatcacctgcaccagatgccggtcgctctccagccgcagctgctgattgtcggactggcgattaggctgggcgatctgctgcgccagccagcgcaccagcgcatgctcgctgtcgagctgcgccgccgcttcttgcaacagctcccccagatgcagcacgtcggtcaagcgacgctcgccgccggcgctggccagcaggttctccgccagttggcgcgctttcatcacctcgctcagcatcggcaacacgccgcggcgcagccagagcgtgcggtaattgtcgaattcattaaccagcgcgtcccaggcgcgctcatcgcggctcaggccgtccagcgtcggcgcgtccagccccatcagcccggtggccatggcgctgcgcagcgtacgctcctgccccggcgccaacaccgcctgcagcaaccacagcaggtctttggcctccggggtgtcaaacacgctgtcgcggttggacaggtagaccgacggaatagacagcgcgctgagcgcatcgcgcaccaacgccgcctcattgcggctgcgcaccagcaccgtgatatcagaggcttgtaccggccgtgacgccttgccgctctgcagccgcgccagcccctgctgcccggcgctgagccagtcgcgaatttgcgtggcgcacaggcgcgccatcagctgttggtaatcacttacacccacgccttctccctgctgcagccagaactgcatcgccggctgcggcgtgccgtgcaattcaaacgccagcccttggttcttttccgccgcgttaacctcaataaaggggatttggccgaacaggaaaggtttttctacctgagaaaacaggtgattgacgctggcgaccatcgacggcgacgagcgccagttggtctccagcgtatagtgggcgctcacctctgaacgcgcacgcatgtaggtgaagatgtcggcgccgcggaaggcgtaaatcgcctgcttgggatcgccgatcagcagcaggccgcaatcaggccggccgacgtaaagtttttggaaaatacggtattgctgcggatcggtatcctggaattcatcgatcatcgccaccgggtatcgctggcggatcgcctgcgccagctgttcgccgccgccgctttgcagggcgccgtccagccggctgagcaggtcgtcaaaccccagctcggcgcgctggcgtttttcctgctgaatggaggtgcggatctcgctgagtgcgcgcgccatgatcaggtcgcgcagcgtcaagggttcatcgaacagttcgtctatcgccgtgaacagcgcatgccgcggcggctcgcccttcttggtcttctccagcagcaccgactggcgaaatttatccagttccttcggcagctggtagtcctgagtctcctgcccgctccattcgccgaccttgttcagccagttcggcaggtgtttactgctgtagctgcgcttatcgacgccggactgggcgattaacgcctcaagatcgcccgccgccgcccgccattgcgccttgatggcgtcgatgcgcgcgacgatctgctcgtggcgcatcaggagggtttcttcgtccttcggcggccgacgcagcgccggcgcttcaccgtgcagatagccggagagatcggccagcaacgcttccgggccgctccactcctggctgaccgcacgcgccacgcccagcggcaacggatagcagtggcgacgccaaaagtcggcacaggcctgccgccgcagcggcagctcgtcctgcaccagcgtttgttcaaacaacatgccggactcgaaggcgttgtgcgtcagcatccgttggcaaaagccgtgaatggtgtagatcgccgcttcgtccatttgccgctccgccgccagcagctgcgcagcggcgtcagacaaatcgtcaatttcttccatcagcgccgaaaacagcagatttttgcattccgcgtctttaccgcgcacgcaggcgatgcgcagcccgtggatattgtcacggatacgcccgcgcagctcctcggtggcggcctcggtaaaggtcaccaccaggatctcttcgaccgtcaacgggcggggaaacgccgcttccccccccaaccccagcagcaagcgcaggtacagcgcgccgatggtaaaagttttgccggtgcccgccgacgcctcgatcaggcgttcgccaaacagcggcaacgtcagcggttctagcctctgcggggcgacttccgtcatggcgtcgccactttgcgcggcaggatctgctgcaatgccgacgcgttcggataggtgacccaatccttaggcgccgcgtaatccgccttgtcttgcccgctgccgctaacctgcgacagcaccgccagcccctgtggctggatcaccgcctggtggaaataatccgccagtttggccggcgtcagctgttgcacctgcgcgatcagtttctgacgagtatcgaaggcgaagttgccgcgatcgaaatcgttggcgaaccggctggcctcttcgctcagagtttgcggccgctgtttcagctcattgatgagcgcctgtttgtactgttcaaagtccgcctcgctcatgtcgcgcaggcgtttctcggttttcgggtagaaatcctgatagcgctggtacaggtaggccggctgtttgctgttgctctgcaacaggaagcccacgccccactggcgccccaccgacatcgggaaagcgaagaccgcgtaccccaattgctcctgcgtgcgcagctggctgtaaaaccacggctgaataatctgccccagcagcgaactgtaggccatgccggtcacttcgtcgtagccggtcggcacataaaccgccgccagcgccgagtcagtgctgctgcccacctgttgcaggttggccagatgatccttgtccaccaccacgtcttcgccgtgccaccattcgctcccggtacagcccagacgatgtttcagcgtcgacgccaacgtgtcgacctgctgcttgctcatgttgcccactaccagcagctccggcgtggcctcggccagcaggctgtcgcgataggccagcacgtctttcagcgttaacgtcttcagcacttcgcggcgctcgctgcgttcggaatacggcacgcgggaaaccatctgcaccggctgaatggccagctcaaacgccttgcccttctcggcggcgtccagttgctccagataccaggacttggcctgcgccagctgatcttccgtcggcgtgaagctggaatagccctcgatcagcgccgtcagcaactgcggcagacgctgggtgaaaccgttggcgttaaacatcaggccgttgttcggcgaggtcgagaagctcagcccaccgaccgatgcctgatagctcagctgatccagcgccaggccggccagataatccgtcagcgagaacagcacctgattgcgcgcggaatccatggttttggcgttgcggaaagcgacggtgacgtcggccttcggctcgtcggcgaagtaacgactcggcatgtacaacacgcgcaggccgggtttatccaccaccatttccggtttcttgaactcgtgcgatggcttggtcagggtaaagtcatccgggatgtacgggttgagcgccggcagcgacagggaaatgccgctctccaactgctgccactgcgtaaagcgctgcggcgtgattttgtcgacctggtaaggcgcgttaacgaaataggccgtcttgttgtgcggttcatccgggctgacgaaccagatgcgcgcgttttgcggcgtcatggcgtccaggcgttcggcgatcgcctttggatcataacggtcggccaggtaaggcgcgtccagcgcatgctcaaccggcacgcgcagcatggtgtccaccagccattcgatgtagtccatgtcgcgcgtgatcgagggatagcggaagtccaggttcagaacatgcgagatttcatcgaagtagctctgcttgatgccctcgctgcgcagcattttcaggtagttgaaaatggcggcgacgacctcatcgcgctgggccaggcctttgtcagtcagcgagacgctgatggcgaagacgccgccgttgcgatccaccatcggatcggcgccggcattgatggcgtccgccaacccttgcttctgcagccagtcagacagggtgtttttgctgcggttgccgatcaggtagctgatgtaggtatcggttttgctgcgaaacgcggcgctgttgttatcgatgcggaactcgaccttcagctgcttgcgcggctgcgccggcacatagtgaatgatgatgccctgctgttccggcgtgacggccggcacggtgatcggcggcacgctggcgtcatgattcggcacgcggccaaaggttttcgccgcaatgccagccaactgcggcagcgactgattaccgtacaaaacgcccatcatcagattggcggaatagtaacgcttatagaagccggtcagttcatcatgcaacttgctgtccggcttgtctttcagcgtatcgagattgccgccggagaagcgcgcgctcgggtgcgccgggttcagggtttccgcgccgacctgcgccatgcgcatgccgtcgcgcgaacgcgccatcgttaactcggcgttcaccgcgttacgctcgcgatcggcattgcccggatccagcagcggctcggcaatggcgtcggccatgcggtcgaccgccggctccagcgcgtcattttccacttccagatagaaggcggtgcgataagaggccgtgctggcgttgtggctgccgccgtgctttttcaggaattcggacaggttttccggctctggatagcgtttggagcccatcagcaccatatgttccagatagtgcgccaatcccagttggctgttcggatcttcgagcgatccaaccggcaatgccagcgccgccagcgatttcggcgcctgggcatcggacaccagcagcaccgtcatgccgttagccaacttgatcgcctcgtactgacgcggatcgtgctcgctcttgttgatcttctccgccagcggttgccatccttgtgcggcccaactcaacggcgcccaacacatagccaataataccagcccggtgatgcgggccaactgtctgcgcatatccaaaataaacccctattctgacatcgccacgcccactccctgacgctggcgacgtacatcaaaaccacataaccaaatctgtactcgccggattcttcgccaatgtggcgccccaaaacgcggcgggtatatgcctgtacgttatgtaagaccgggaatcaccccaatggttgaatataaccttcgttatttttaccacctcccgccgcacagcaccaccgggggattgttaccccaggttatgacgcgccaccggcagcagataacgctctgtttcggccagtatttgcgctaagtattcattatccaattggcggaacactcgctgaacgtagggatcttccccttctccgggaatgcgctgatcgccctgccaggcctgcagcaatttggcgcgagcctttgtttgcgcttcttcctcccagtcgatttgctgtgtttccggctgatagcactgactcagccacgcccagccgctcttgttcagcaacaacagcggctgacacagaccgcgctgataacccgccagcagctccgccaactgcgcctgcgcctcttcaggcgccagcgcggcaaagcgccaggcggagttcttgcggccgtagatgcggctctcgccggtgccgccggcgcggcagtacaccaggtgctccagccacagcaatatgccatccaccgccgacaacgtggcgggccgccagcgcaacaggccgtcatcctgcacctgatgcagccagccgctgagacgtacgccggcaatatcgatatccaattccaggctatggctctctgcgcgttccgcacgcacctgctcggccagttcgctcatctcttcctgctgcttttgccaatagatctcgccaaaggcgccatagggcaagccgccggcggcacgcacccgctggaacaaccgttcgggatcgtcgccgtcgatcagggtattcagcagttggctgttgaactggtagcggctgaggttatccagcgtgaagggctcttcgtccggcagctcagtctcttccaggataaaactgacgcccaaccgcaattggaaaaacgcgcgaatcggatggcggtaaaaccgcagcagctcatccaatgatatttgctgcagcgcttcggcaggcagcggctggttgaacgccggatgcgccgcaccgcgaccatctgcggcgggcagccactcggcggcatagctttgcgcctccgagcccggcaagaaattctcggcggcgaacggcatgcgcgcatgccacttcagcaagtgctcaccaacccgccgggcgctgtcgtctgcgctgagttcctcatctcccggcaggcaatagctttgctccaggtactcaagcagctcagtgaccagcacagaagggtagcgcgggctgttgtcctgaatggaacggccgatgaagctgatatatagccgctgctgagcggacagaatcgcttccaggaacagatatcggtcgtcatcgcggcggctgcggtcgccgcgcttgacctgctgcgccatcagatcaaagcccagcggcggcagcgtgcgcggatacacgccgtcgttcatgcccagcaggcacaccaccttgaacggaatcgagcgcatcggcatcagcgtacagaagttgatttgcccggcgaggaagcgctggctgatgcgctcctgatcgaggcgcgccgccagatcgtcgcgcagaatggtcaacggcacctcatcgggatagcgcgccgccaagccaaaattaatggcctgctgccactgctgctcaatcaatgccagcaccacttcggtatcgctgtccgctgcgaagaaggcatccagcagttggcggcacagcggcagccacgcctcgagcgggcgcgcttcgctcaagatttgccgccagtggctgagctgcgccagcaggtctgccagttgccccgccagttcggcgaccaacccgctcgattcatcgtaaggcaaaatgccctgccaatcgccggcgttgctgtccatcgcgtaaccgagcagcatgcgcgtaatgccgaatcgccaggtgtgctggccggtggcgggcagatccagttcgcgcacgttatcgtcgtccagaccccagcgcacgccggattcaccgacccagtgacgcaacaggcgcaacccctcttcgccaatggcgaaacgggcggccagggcaggtacttccagcagcgccagcacctgttccgacgtaaagcggctttgcggcaaatcgagcagggagatgaacgcctgcaaagccggatgcgcctggcgcgctttacggtcagaaatggcaaacggcaggtagcgctcggcgggggcattgccgaacaccgcctgaatgtaaggcgtgtagctgtcgatatccgccaccatcacgatgatgtcgcgcggcgtcaacgcgggatcctgcgcaagcatggtcagcagttgatcgtgcagcacctccacttcccgctgtgggctgtggcaggcgtgcaggctgagggagcggtcgttttcatcaagcggacgtttgctgaagctgctttccagcgtttccgcggtaataccgattaccgcatggtcttccagttccagcatatcgcgctgaacggcgtgcagcatggtatcggccgggatatcgacaaaggcgtcgacctcttgcgccccttccatctgcgacagcaggtaaaggtgatcgcgccccagcttgccccaggaggccagcagcgggttgctgagttgctgctgcccttcggcgtcaaacaggcgcgccgcgtcatccggctcgcggaacagcccttgctcgcgcgcctgatgatagtgacgacgcttgcggctctgcaagcgggccagaaaggcgtaatcctgaatatcaccccaatagtagcgacaggggttggtgaacatcaggtggatgtcgatatgccgccccagcgcctgcagcgcttccagatagatcggcggcaatgccgagatgccgcagataaacacccgcggcggcaaaccgggcgggcacgtttttgcctgctccagcgcgtggataaagcggctgtacagattggcgcggtgccattccggctgccccaattcgcgcgtgtattccaccagtcgcgcccagagcggcgcctgccattgctgagcctccgccagaccgtcgatgcgctcgccgcgctgccagctctccagccactgcgggcgataaaccaaatattggtcgaacaggtcggcgacccggccagccaactggtggattttgcgcttgtcgccgtcatcggtcagatagtgctgcagtggcgcaaacgccggctgagtcaacatctccggtaacaaccacatcagcttccaggtcatggcctccttgctgaaggcgctctctttcggaatatccggcaacacccgggtgaacatgtcccaaatgaaggtcgccggcagcggaaacgcgacattggcggcgataccgaactgttccgccagctgcatctgcagccattgcgccataccggggctttgcaccagcaccacctcctgttgaaaaggatcggtcaacggatctctggctatcagcgcgctggtcagcgttttcaacaaatccagctgattggaatgataaaccgtgaacatgaagactcctttaaaacaagatacgtaccggctcaaaaacgggtgcaataccagcggctcagcgtcgcccactgccgttgcggagtttgtactctgaccgtcaatcggcggcaatccgcatccgcgccgtcgaacgccgtctcgcgtcgccagccttccggcagcggttcggcatcgagccgaccggtgactgcgaacgcctccaactgctgatgcgccatcacccaggcttgccggtagtgccactggcgctggaacgactgcaacagcacctgatgatactgtaacaagcccagcagcgacaccgagaacaacaatgccgccaccaacacttccggcaggctgaagccgttgcgggataaccgccctgcgcgagcgttaaccctcacagtcggccggccttttctcggggcaaaaatccagccggccgcccggctgcgcttgcaccctgccgaccgattccgcaccgtcaaacgcgccccattgatacagccaaagcggctcaccgccgcgcatctccccaaggccgcgtaccgtcacgacgcccgctctggcagacagccgggcgcaggccgtcagttccgcgcgctgcctgcataaccaggccgccgcactcagctcggcgcgcggccaacgctggagcatgccccaactcagcgccgatgcggcctgattgtaagcctggaggtagcgctgctgatcggcggccagtaacagcgcgttatccaattgccggtgctgggcattgagcaacatcaaccccaacgccagcagcaacattaccgccgccaaagtactgccacctcgctggctccgccggttcatggcaacgccgccatttcgacgctcccgctcaggctgcgcctgatacgcgcatcgccgacagagcgccccgccagagtcaaacgggccagcgcaccgccatactccccgcgctctatcgccacatgaaaccgctcaatgcgcacttcgtcacgatcgagcagccgctcccagccgccgccgtcgcattggcttacgccgcgctgcccttccaagccgccattgcgcagccgatagccgaaataacctgcatcctcgcccgaggtgagccattgcccactgcgggtgatatcgtaagcgacgataacgcagctgcccgccgcttctcccaccgcctggccgatcagcagcgggcggccggcgcactgcccggcacagaaaccggcgcggcgcaggtctttctcgatgccgaacgccagttgccgcagcgttgactccagccgaaaatgctggccgacggccacgttttgctggcgcaacagcgggtaggttttcgcggcgccgagcgcgatcacgctgccgaacaccagcgccaacatcacctccggcaaggtaaaaccgcgttctacagtcagcatggcgcgatcccccttatccggagcccttcgctgcacaaacgcagccgccctcgggcggacagcactagccgcaggccgcctgcctcgttgctgagcaggatgtgccccgcctgcgcggtattgcgcaagccgtaaaacccgatctctttgtcggtgtagccgctcaaaacgacgtcgcggtaagacggtgagaaaacggaaccctcggcggaagcgcaatccggcggcggcacaccgccgcccaggcaccagggcgtgccgttcttgaaccacagcagcgtcgtgcggttgcgccagttggcgtccgcctgcagtcgcagtaaaaacgccagcagctgctgggcagtatgttccaggcgcaacgtttgctgatggtggcgccattgaccgacgccccagccggtgagcatgccggcgatcagtagcgccgccaacagctcaatcagcgtcatgccacgctggcggtgatcgatgttcgagagcgtattttcattcatgcggccagtttaagggccgtaacatggcggtaaagccgcatgcgcaagccttgcggcaaactgcgcaatgttttccctgtagcgacaaatggcgacaataaaatgcggcgcggcgcgcaatgcggataaaaaaaggggcgcaatcgctgcgcccctggtgtgatgcggttaaggtcagatcgcgaccggcgccttgatggccgggtgcggatcgtaaccttcgatctcgaagtcttcgaaacggtaatcgaacagcgaagccggcttgcgtttgatcaccagcttcggcaacggacggggttcacgcgtcagctgcagcttcgtctgttccatatgattgctgtacagatgggtatcgccaccggtccagacgaagtcgccgacgtccaaatcgcactgctgcgccatcatatgcaccaacagcgcgtagctggcgatgttgaacggcaggccgaggaagacgtcgcaggaacgctggtacagctggcaagagagcttgccgtccgccacgtagaactggaagaacgcgtggcacggcgccagcgccatctggtccagctcaccgacgttccaggcggaaacgatgatgcggcgcgaatccggatcttgtttcagctgctggagcacgttgctcagctgatcgatctgacgaccgtccgccgcgccccaggcgcgccactgcttgccgtacaccgggccgagatcgccgttttcatcggcccactcgtcccaaatggtgaccttgttgtcacgcagataggcgatgttggtatcgccgttcaggaaccacaacagctcatgaatgatcgaacgcagatgacatttcttggtggtcaccaacgggaaaccttcctgcaagttgaaacgcatctggtggccgaaaatcgacaatgtgccagtgccggtacggtcggctttaggggtgccctcggcgagcaccttgttcatcaaatccagatactgtttcatttgtccctcacgacagttgttgctgcgggcgacgacggtacgcccaaatcatcataataacaccggccaccaccatcgggatggacaggatctgccccatgctgatcacgccgtcgaacaggccaagctgggcatccggctggcggaacgcttcaacgatgatgcggaatgcgccataaccgatcaggaacaggcccgatacggcacccatcggccgcggcttgcggatgaacaggttcagaatgataaacagcaccacgccttcaagcagcagttcatacagctgggacgggtgacgcggcagcacgccgtactgattcagcagcggcagcagagaagggtcggcggcggcgagcgccacgtcttcgctgcgcgagcttgggaacagcatcgcccaaggggtgtcggtggtcacgcggccccacagttcaccgttgatgaagttgccgaggcggccggcgcccaaaccgaacgggatcaatggcgcgataaaatcggaaacctggaagaaggtgcgtttggtgcggcgagcgaaccagaacatcaccagaatcacccccatcaatccgccgtggaacgacatgccgccatcccagactttaaacagatagagcggattatccaggaacagcggcaggttgtagaacagcacatagcccacgcggccaccgacgaatacgcccaggaaaccggcgtagagcaggttttccacttcgtccttggtccagccgctgcccggcttgttggcgcggcgcaccgccagccacatggcaaaaacgaagccgaccagatacatcaggccgtaccaatgcaaagaaaccgggccaatggagaaaatgaccggatcaaatttaggaaacgccagatagctattgctcatctatcaccacaacatgtctgttatttttccccatgcgggggcgggcaggtgccaaacgtcggcgcaggttgtcacacgcctttcaaacggcagcgttgaccgctgcggtttgcaagacgacgaacatgcgtcgcgctgaggttgcgcatcataacataggcttagcgcggtccgggccggcagcgcgggaaaagttctgtaaaaaaatcacatcgcgcggcgattatctgccgccgcgaatcaacccgcccatgccgcgtcgttccataaacgccgccaccagatggcgcacttcggtggtcatttgggtgttcaacacccggtgcgccaacacttccgcgtcggcaaggtcgatatgccgcagcaggtatttgatgcgcgccacgctgcggccgttcatgctcagattgcgatagcccatgcccaccagcaacagcgcgcccatgggatcgccggccaactcaccgcacaggctaagctgcagcccggctgctttcccctgctcggcgatcagcttcagcacctgcagcatcgcgggatgcaggctgtcgtacagcgaggctacccgcgtgttgttgcgatccaccgccagcaggtactgggtcaaatcgttggtgccgaccgagatgaagtcgacgcgcccggccaaatgcgggatcaggaaaatcatcgacggcacttccagcatcacgccgattttcggtttcgggatcgcgtagccaagcacctcttccacctcgcgcccggcgcggtcaatcaagcgcttggcctcatcgacctcttccaggctggtgaccatcggcagcaaaatgcccaggttgccggtgccggcattggcgcgcagcatagcgcgcacctgtatcaaaaagatctccggctgatccagagtgatgcggatgccgcgccaccccaggcaagggttttcttcgctgatcggcatatagggcagttgcttgtcggcgccgatatccagggtgcgcagcgtaaccggcttgctcggatagagctgcagcatgccttgatactgcgcgacctgttcttcttcggacgggaaaccgctttgcaacatgaacgggatttcggtgcggtacaaccccacgccatccactcggccgcccaacagctgttcatgttccgggctgaggccggcgttcagcatcacctgaacgcgttcgccgcttttcaactgcgccggctgctcgacgtcgtcttccgccagcttgctcaactccagctcttcgctgatcagccgttggtattcctgcaccaacaccggctcaggatcgaccagcagttcaccgcgataaccgtcgacgatcagcaaccgctggctgagcagagaaggctggatgtcggcgcccatcaccgtcggcacgcccatcgcacgcaccaaaatcgccgcatgcgagttggcggcgccgtcgcgcaccaccacgccgaccaggcgatcctgcggcacttcggccagcaatgtcgcggtcagctcatctgccaccagcacaaaacgcgccggccactgggtggcgccctgggtggtgtcgtcgaggtggaacagcaggcgttggcccagcgcgcgcaggtcgctgccgcgctcgcgcatataggtgtcctgcagtttggcgaactgttcggcaaaggcttctatcacctgcttcaccgcccactccgccaccgaaccgttgtcgatttcggcgaacagttcgcgcttgaggcgagcgtcgtttaacaggtgagaataaagatcgaagatcgccgcgctctctttttgcgagctggcggcaaaacgcttgctgaaacggcgaaactccgcgccggcctcttccagcgccagcgtcaggcgctcgcgctcgctggcggtgtccagcgtcgacgcgcggtaaacctgatcgagcgaaggctggctgctgtcctgccacccttccgccaccgccacgccgggcgaggccgccagcgcgcgcacgcgcgtttggcgatactgaccgaaaatggcgttgagctgcgactgtgacaggatcccggccatctgcgtggccagggtgaccatgaaagactcttcgctttcatcgaactggcgcagctcgcgctgctgcaccaccagcacccccagcagttggcgccgatgaatgatcggcaccccgaggaaggatcggaaacgatcctctttcacctgcggaacgtatttaaaactggggtggctttgggcatcggccaggttgataggctcggctcggcggccgaccaacccgacgacgccctcgtcaaacgccaatgcgatagtgcgcccacgcggctttttcagcccgcgcgtggccatcaggtagtaacagcggcgatcgttgtccgccaggtagatggaacacacttcggtgtccatcgccagacaggtttcattgaccagcagatccagcgcatccgtcagactggccgccgcggccaccttctctacaatttctcgcaagcgcgtgagcatagtcggcttaacttaacctctctttcggcgataagcgggggcctgccgcggcgccgcctgctcttgcatcggcatcacggtcacggcgaattctttcatcacccggcggtagacgtcgcgtttgaacgacaccacctggcgcaccggataccagaagctcacccagcgccaaccgtcgaactccggcgtgctgctgcgctgcatattgatatcagcgtcattgcacagtagctgcaacaaaaaccatttttgcttttggccgatacaaaccggctttgtgtcccaacgcaccaaacgtttcggcaatttatagcgcaaccagttgcgggtcgaagccaggatgcgcacatcctttttactcagccccacttcttcgaacagctcacggtacatcgcctgctccgcagtttcgccagggttaatcccaccttggggaaactgccaggagtgctgaccgtaacggcgggcccataggacctgcccctgacgattacagattacgataccaacattcgggcggtagccatcatcatcgatcaccggactacctcgataagcttaaattcgcatagatgtcctgattgtttcacacaagctacaggcggtaaaccactgctttacggcgctgcgggccggataacattgggataactcacagatataggcaaagttataaacataccctagcctttcagaccggttttattcactttttctgtggataggtgtgtgcagaactcgagggataagccggtaaaactctcgtcccctaaaatcccccctcatacctaaaaacaaatattaaacttaaaaacatacagttaaccaatatcccacagtgatttacagggcaaaaatgtgatctatgcacggtaaggatcttaccctggcgaaagatccaccaacgccgtttttatccacagattatccgggcaagttacgcacaaaacggacaaattcgtaaaaatccgcctgagtcaaggctgtaaattgaaccagtgatcggtaaaaatttgggttatcccataaatctgtggataaataggtgtaagatcctgtttattgtcggtggcttcaggtgaacaagccccgcaagtgcattgtcgcccgcgcaaggaaagaaaaaaagtcatgtaaaatcatgctactattattcttttccccaggcgactggggttagcgtttcccgcgtatctatgcagtacgtttttcaaccaaattcaacaggcttgatttatggcgtttttatcccctctgccgcccccgccggaaaatgaacggcagctgttcgagcgcgctcaggcgctggccggcttcagttttggcgaactggccgcccgcgcgcagttgccgatccccaaggatctgaaacgcgataaaggctgggtgggcatgctgctggagctgtacctcggcgccatggccggcagtaaaccggaacaggattttcctgagctgggcattgagctgaaaaccattcctgtcgacgccgccggcaaaccactggagaccactttcgtctgcgtcgccccgctcaccggcaacagcggcgtcacctgggccagcagccacgttcgccacaagctggcgcgcgtgttgtggataccggtagagggcgaacggcaaatccctctggcgcagcgccgcgtcggttcgccgctgctgtggagcccgagccttgctgaagaagagatgctgcgccgcgattgggaagagctgatggatctgattgtgctcggtcacgtagaacgcatcaccgcacgccacggcgaagtgctgcaactgcgccccaaagcggccaacaacaaggcgctcaccgaagccatcggcgaacaggggcaacctatcatgacgctgccgcgcggtttctatctgaaaaagggttttaccggcgcgctgctggcaagacatttctcaatctaagcgatttcgtttaactctggtttagctagccctgtcagcgccacgataaacgcgtataattcacgctttgcatttattaagtattaaggtgtgtcgggcaatgttcgaatggattatggatcccaatgcctggttagcgttaggtacgctaaccattcttgagatcgtactgggtattgataacatcatttttctgtcgctggtggtggcgaagctgcccaaagcgcaacagaacaaagctcgccgaatgggcttggccgccgccatgctgatgcgcctggcgctgctggcctccatcgcctgggtgatccgcttgacgcacccgctgttcaccgtgctggatcacgccatttccgcccgcgatctgatcctgctgctggggggactgttcctgatctggaaagccagcaaagagatccacgaaaccatcgaagggtcggaagaagagcaccacaccaaggtgcacagcttcttcggcgcgatcgtacagatcatgctgttggatatcatcttcagtctggattcggtgattaccgccgtgggcctttccgatcacctgttcatcatgatggcggcggtggtgattgccgtcggcgtgatgatgttcgccgcccggccgatcggcgaattcgtcaatcgccatccgtcggtgaaaatgctggcgctggcgttcctgatcctggtgggcttcacgctgatgctggaaagcttccaggtgcacgtgccgaaaggctacatctacttcgccatgttcttctccatgtcggtagaagcgctcaatctgatgcgcagcaagaaaaatcgttcgccggaataaccctgcgcggaggccgccatcggcggcttccgccgtttcgttgccccctcatttcagtttttcttatcagataaagacttatctgagacgtccccggccaagagtttgctaatcttgaaagaatattgtttttgcataatcgaggatccgcaggatgaaaaagtgggtaatggcagtgtctgcgctggtgatggcggccggtttggcgggatgttccagcgactacgtcatggcgaccaaagacgggaacatgatcctgacgcaaggcaaaccagagatcgacgaagacaccggactcatcagttataaagacgagaaaggcaaccaccgccagatcaacggcgatcaggtttcccaggttatcgaacgctaatcaccgctcgccggctatcgcccgttcaagcgcggtagccctcattcgtctccgcactgaatccgcttcccccatcttcaccgcttggttatagtcaggaaaggcgacatcgccgcccgacggactttgcgccgtcttctgaattgggctcctgtttcaccgggccgcgcggcccgtcagcgctaacaagaaaggaaggccgttaatgcaataccaccgtattccccacagttctttagaagtgagcgtgctgggactgggcaccatgacctttggcgaacagaacagcgaagccgacgcccatgcgcaactggactatgcattggccgcaggcgtgaacctgatagacaccgccgaactgtacccggtgccgcctcgcccggaaacccagggcctgaccgagagctatatcggcagttggatcaaggcgcgcggcaatcgcgaaaaaatcgtcctggccagcaaagtttcgggcccggtacgcggcaccgacagcagcatccgtccgcagcaggcgctggatcgcaaaaacatccgcgccgcgctcgacgccagcctcaagcggctgaacaccgattatctcgatctttatcaattgcactggccgcagcgtgctaccaactgctttggcaaactcaactatcaatacactgaggacaaagctacggtcacgctgttggaaacgctggaagcgctgaccgagcaggtgcgcgccggcaagatccgctatatcggggtttccaatgaaacgccctggggcgtgatgcgctacctgcagctggcggagaaacatgagctgccgcgcatcgtgtcgattcaaaatccgtacagcctgctgaaccgcagctttgagattggcctggccgagatcagccagcacgaaggggtggaactgctggcctattccagcctggcgttcggcaccctgagcggtaaatacctcaacggcgcaaaaccggccggcgcgcgcaatacgctgttcacccgtttcaaccgttattcagggcagcaaacccagttggcgatcgccgaatacgtggcgctggccaaaaaacacgggctggatccttcgcagatggccttggccttcgtgcgtcagcagccgttcgtcgccagcactctgctgggcgccacctcggtggatcagttgaaaatcaacctcgacagcctcgacgtgattctggatgaggacgtgctgcaggcgctcgaagaaatccacacccggtttaccattccggcgccttgatagcctgagggcgcagcctggctgcgccccgtttcaccgccgctgagaccaccacaatgcgctaatcgccagcgcaaacactacgccaaaccctacgccgacgcccaccaccggcacgcccagcttcacgaccaaagaatacaggcccagcatcagcaacatggcggcgttttcacccaggttttgcactgcgatcgcattgccggcgccgaccgaatgtttgccccgctcctgcagcaacgcattgagcggcacgacgaagaagccccccagcatgccgatgagcgccagcaagacgtaggcattgagcatggtcgtttgcagcgcaaacaccgcgaccgcgatgccgataaggatcccggccggcatgcagcgtttcaccgtcttcagcgtgacgaagcgcgcggcggcacccgcgcccaacacgatgccgacggccaccatggcgttcagcagcgtcggcgtggcgttatcggcgatgccaagcgccaccggcacccacagcaccaacagaaaacgcagcgtcacgccggccccccaaaacaggctggtgccaatcaatgagaaacgcgtctgcccatcgcgccataatgtgacgcaggcggtaaagaaactgttcgtcatggcccgcggccgccatgaagcccctgggcgcgccgccgccagacgtggaatatacaggttggcgaccaccgcccccgcgtaaaccaacgcgcaggccgccagcgccgcgaccacgtgccagtccgccagaataccgccggccaccgaaccgatcagaatggcggcgatggtcgaggcctccatcaggccgttagccttgaccagcttctcgccgctggtgatctcgcccagaatgccgtatttggccggagaatacgcggcggcccccacgccgaccaggctgtaacccagaaacgggttccccccaaaacagatcaccaatgcccccgccagcttcagcgcgttggcgaacatcatcacccgccctttggcgaagctgtcggccacctggccgacaaacggtgccaggatgatgtaggtggcgacgaaggccatctgcaggatcggctggctccagtccggatacagctgctgcttgatcagcgccagcgtggcgaacagcaacgcattgtcgccgaacgccgagaggaactgcgcgctgatcaccgcgatcatgccgcgtgacaacaaaggggattcggtcgaaggattcatcaggcactctccggctgttcggccatatgacgcaaggtgacgaaatcaggtttgccgctgccgagcaccggcagcgttttcaacaggcgaatatcgcgcggcaccgccagctccgggctgcccagctcgcgcgccacccgcagcaatgcctcgcgggtaatggcgggatcggtggtgaacagcaccagtgcctcgcctttgctgctgtcgcttttgaccgtggcggcatgcagtttttccggcgacagccgttgcgccagcagttcgacgctctccagcgacaccatctcgcccgccagcttggcgaagcgcttcacgcgtccgcgaatggtgcagtaaccctgctcatccaggctgacgatatcgccggtatcataccaacccggctgcagcacaccgttcgcatcttccgccgccggcggttccagctcaccgggacgttcaacccgcaggtagcctttcatgatattcggccccttcagctgcaggcggccgccgttatcgatgcccggcaccgcgatcaaacgcgcctccatctgcggcatgatacggccaacggtgcccaccttggtcgccagcggcacgttgatcgacaccaccggcgcgcactcggtcacgccatagccttccagaatgcggatgccgtatttatcctgatagatctgtttggtgctgtccgccagtttctccgcgccggccaccacatagcgcaagcgggcgaaatcatacggatgcgcgaagcgcgcatagttgttgaggaaggtcgccgtgccgaacagtaccgtgcagttacggtcatacaccaactccggcaccacgcgatagtgcagcgggctggggtagaggaaaatgcggctgccggtgagaagcggcgtcagcagccccaccgtcaggccgaacgagtggaacagcggcagtgacgacatgaagcggtcgcgcggcgtgaaatcggcgatggtgcggatttgttctacgttggccagcaggctggcatgcgaatgcaccacgcccttgggctggccttcggagccggaagtgaacaagatcagcgccgcgtcctccgggcgttgcggcaacatcgcgcgctgcggttgcagcaagtgccgcaggatccacagcttgtccgccagcgtaacggtgtctttcagatcctccagatacacccagttggcctgcgtcacctgctccggcagatgggtcagcttgcccttctccaggaactggcgcgaggtgacgatggtcttgatgccggcggcggtcatcgcgctgttcaggccgttggcgccggcggtgtagttgagcatcgccggaatgcggttgcgcagcgaagcgccgaagatcgccgccgcggtgatggtggcgttgggcaacagcagcccgacgtgctccccttcggcggtaaagcgctgcagaatgcggctgacgcccagcgatttcttgatcagcgtttggtagctgtcctctttgaaagcgatgtcttcgatacagggcttgcggtgcccatagcgctgctgcgccgccagcaaggcatggaacagcgtctgcggttcgcgcgtctccatgcgcgcccgcatcatgatctgcatcagccgatcgcccgccagcgcccgccgctcgcgcgcacgcggagcctccggcatcggcagcgtggtcggcggcaagatgcggatgctgatttgcggaaaccagcggatcttgaacaccccggccatgcggccgaacgggctgaattcggggccgtcgatccgcaccggcaccacggtggcgcccgatttggcggcgataaacgccgcgccgtcgtagattttcatcagcgcgccggttacggtgatgcgcccttcagggaacaccacgatcggccgcccctgttcgaccatgcgcaccagctgcttgatggccatcggcttggtgggatcgagcgagacgaaatcgatgtaaggccgcagccagcgcataaaccagctctcgccgatgctggcatagaccgcaaacaccggttttatcggcaggaacagcgccagcagtacgccgtcgaggaaagagacgtggttcggcgtaatcagtaatttttgccgttcgaagtgctggacgtccccttcgacccgtacccgaaacaacaggcgaaacagcacgcgcagcagtgaaaagatcatgcccttctcccttggccatggaggcgtaaatcgttgtagggaaaagaatactatatggcaggcaaaaaaaaacctacgcatccgcgtaggttggtgcaattgaaaatggcttcaacatacagagtatgctgatttctcaccaatcaatacctctgggatcacctactctagagagatggcatgcaggaaactaccgccgaatcgcaagagttctgctccaaatgcaaccagctgtaaatttcccgcgatctgctgtaataactcaatgaaacttaaaccttcccgcagcgacgaaaaaataaatataacaacgacgagccagtgacccagacgtgaaatcttcactcatcgcgcgctgacctcgaccaggcagctcatggcgttcggcccctgcgtcagcggcgaggtgccgatatccagcgtcagcacgttcgggttgcccgcctgctcgaccggccggcgctgcgcgtcgaaacccggctcgaaccaggcaccggtcgccatcaacaccacgccgcgcgtcacgccatcggtgagcgatacccccgccagacagctgccgcgcgcattgctgaccagcacttcggcgccgtccgccacgccgcgcggcgccgcatcgtccggatgcatatacagggtttcgcgcccggcggtcttgttgccctgcgccagcggcgccggatccatctggctatgcaggcgatcgctcggctgaatggagatcaggtgcagcggccagtttttggcctgcggcgcacccagccactccaccggcggccgccactgcggatgcggagcgaaatcttcgtagcgatagccggcgatccgctcgctgaacaattcgatcttgccgctgggcgtttgcagcgggttaacctggggatcggcgcgaaacgcgtcaaaaaatacaaactctttggccggcgcgggcagctcgacatagccccgttgccagaacgcctcaaactcgggccaggcgacgccggcgcgctgctgcgccgcgccgcattgccgatagatagcttcgatccaggcgcgctcatcgcggttttcggtaaagcgctcgcgataaccgagacgctccgccagatcggcgaagatatcgaaatcgttgcgcgcctgatgctgcggcgaaatggcctgatgcatcgccaacacgtagcgatcgcgcgacgagccgccgatgtcgttgcgttccagcgaactggtgaccggcaacacgatatccgccattttggctgccgccgtccaccagatatcttggacgatcaccgtatccggcttctgccaaccttccaccagtcggttcaactgctgatggtgatggaacgggttgccgccggcccagtgcaccagatggatatccggataatgccgcgtctcgccgcaaaattgataggcttcgccggggtgcagcagcatgtcgcagatgcgcgccaccgggatcgccagcccggccgggttatcccctaccggcatggtcggcgcgggggtatccacgcgcgggttgccgacgccgttcattgagccatggccgaacgaaaaaccgccgcccggcagccccacctgacccagcatcgacgacagcgcgatcatcatccagtacggttgctcgccacgatgcgcgcgctgcacagagtaggaacaggtgataaaactgcgcacgccgatcagctgccgcgccagcagcgctatgcgcgccgtcggaatgccggtgatggcgctggcccaggccggcgttttcgccacgccgtcgctcacgccgttcaggtaatccgccaactgttgataacccacgcagtggctgtgcaggaaggcttcatcctgcgcgcccagccgctggatttcgtaagccagcgccagcatcagcgccacgtcggtattcggccggatcgggatccattccgcattgacgaactcggggcaatcatcgcgcatcgggctgatgttgaccaccggcgtacccttgcgcgccagcttttgcagccagggcttgagcgcatgttccgccgcgccgccggaagagacctgagcgtttttcagcgccaacccaccaaacgccacaaacagctcgcaatgctccaccacgctcggccaactggtgacgcgcccggtcaacggcgagaaagtgccgatcacatacggcagaaagaactgcgctgcgccccagctgtagttgccctgctgatcgaccccgccgccgccgctgaaatagaatcgccgcaccagcgagcgggcatggtgcaaccgcccggccgacgaccagccataagagccggtaaacaacccggaggcgccgtagcgctcgcgcacccggcgattctcctgcgccaccaaatcgagcgccaattcccagtctacctcgacgaaatcttccctgccgcgcagcgtacggtcgctgccctcgcgcttttgcagccacgagcggcgcaccgccggcttgcgaatgcgtttgtcggagtaaaccatcggcgcgatggaatcgagcagcggcgaagggtcgggatcgtcgacgaagggttcacaacggataagccggccgtcttcaaccacggcggtataagcgccccaatgggcgagctgcggatagcgtttaatggacatggcgttctcggcgcaaatcggaatgcacagacgttacctcaagcccaccgccggtgccaacgtacaaattgcgctatcgttcggtagcagttggttatgcgtacagactcgaagagattctgcaaccgccgccacaagttgcgcacgagaccgcttgcagccccggtttttttccgcaaaactgggggatgtaagcgattacccaggatgtgttgactgatatggctacgataaaggatgttgccaggctggcgggggtttccgtggccacggtatcccgcgtgataaacaattcccccaaggccagcgaagggtcgcgcaccgcggtgcaggccgcgatggaacagctgcagtatcaccctaacgccaacgctcgggcgctggcgcagcaatccaccgagacgctggggctgatcgtctccgacgtttccgatcccttcttcggcgcgatggtcaaagcggtcgagcaggtggcctacgccacccacaattttctgctgattggcaacggttaccacgacgccgaaaaagagcgtcaggcgattgaacagctggtgcggcaccgctgcgaagcgctggttgtgcacgccaaaaggctgagcgatcaggaactttgcggctggatgcaacagatcccgggcatggtgctgatcaatcgcacgctgccgggcttcgaaacgcgctgcgtggcgctcgacgatcgctacggcgcctggctggcaacccgtcatctgatccagcaagggcatcagcgcatcgccatcatctgctccacccaccagatttccgacgccaccgaccggctgcagggctatctcgacgcgctgcgggaacacggtatcgcggtggatgaaaagctgatcgcctatggtgaaccggacgaaatcggcggcgaacaggcgatgaccgaattgctcggccgcggccgttcgttctccgccattacctgttacaacgatccgatggccgccggcgcgctttcggtgctgagcgataacagcgtcgacgtaccgggggaaatttcgctgatcggtttcgacgacgtgctgatttcgcgctatcttcggccgcgcctgaccaccattcgctacccgatcgtggcgatggcgacccaggcggcggagctggcgctggcgctggccaaccggcaaccgctgccggaaatcaccaacatgttcagcccaacgctggtgcgccgccactcggtcgccaccctcaacaacgcacacgaacagccgtaattcccgccgccgcatgggtgagccgtcacccatgcgctcagattgcgcagcccgccgcatttcccgcttttggattttttccgctcccagcgttcgtgcatattgttggcacaataacctttacactatatagcataaacgctatattcggagcgcgtcatgtggcaagtggtgaccgtcgaacggtttgacgactggtttttggcgctcaacaacgcccagcaaacaagcatcctggcggcgatctacaaattgcagacgttcggtccgcaattggcgcggccgcatgccgatacgctgcatttttccgacgcggtccggcagttgaaggagctgcgcattcaacatcgcgggcgccctttcagggtggttttcgcctttgatccacagcggcaagcggtattgctgtgcggcggcgataaaaccggcgacaaacgcttttaccagcgcatgttgcccatcgccgccatggagttttcacattatctggcaacccggaggtagtgcagatggccaaacctttatcccaactgatcgataaactcgatcccgccgtcgttgccgccgccaggcaaaaagcggaccaggagattttcgagctgcggctggcgatgctgagggaagagttggcggtttctcaggttgaattggcgaagcggctcggcatcagccaaccctccgtcgccaatttggaaaagcgcggcagcgaaatcaaactgtcgtcgctcaaacgctatatcgaggcgatgggcggcacgctgtcgctggatgtgcaattgcccaatggccagcaccgccgcatgacactgtgaagcgggcgccaggcgcccgcccgctgatcagataagttccagcgcgatcagctcttcgatggtttggcggcggcggatcaaacgcggctcgccgttttcgaacagcacttcaggcaacagcggacggctgttgtagttggaggacatcgacgcgccgtaggcgccggtatcgtggaacaccagataatcgccgatctgcaccggcggcagctcgcgggtttccacaccgccgcccgcctgctgggtaaacacgtcgccggattcgcacaacggcccggcgatcaccgtgtcgcgcagcgcttgccccgaggtatcgcgcccatcggccggcaacagcgaaatatggtggtaactgccgtacatcgccgggcgcatcagatcgttaaaaccggcgtccaccagcacgaagtggcggctgcccatgtcttttaccgcccgcacttcggccaccaagacgcccgcttccgccatcaggaaacgtccgggttcaatctccagctgcaccggatgccccagatgcgcggcgatgcgttcacgcgcccggttccacaaaccgaaatagtgttcggtatcgatcgcctcttcgccgtactgatacgggatagacaggccgccgccggcggaaatggcgctgatgtcatgaccgagatcgatcacctgctgcaccatcgcatcgcagacccgctccagatgctggtaatcgacgccggagccgatatgcatatgcacgccgatcagcttcaggccgtagcggcgaattttctccaccgcctgcggcaggtcggcataccagatgccgtgcttgctgttctcgccgccggtgttggttttctggctgtggccgtggccaaatcccgggttaacgcgcagccacaccgggtgccctgcggaaacctggccgagctgatccagcatgtcgatggaaccggcgttaaccgggatcttcaattcgctgacgcgcgccagcgtggcgtgatccaacacgtccgcggtaaacacgatctcgctcggttcgccgcccggttgaaaaccggcctgcagcgcccgttcgatctcgcccagcgacaccgaatccaccttcacaccctgctcgcgcatcaagcgcaaaatatgaatgttcgaacaggccttctgcgcgaaacgaatggtgtcgaagtggcgcagctgagcgatgcgctggctgatgatgtccgcatcataggcccagaccgggcaaccgaaacgctgcggcaaggccagcaggttagcggcgttcaacgcggtggaggtgtcgtgcaacgggcgtggcatggtgatattcccaattcgaaaatgacggcagataaagccatagtgccgcacgctgaatcgagtggaaaatatctatttagccgtagtctattcatttatgatatggctttctctacagtcgagcggcctcgccatgcacagtatctctttgcggcagatcgaaatctttcgggcggtgatgaccaccggcaacctgaccgaggcggcagccctgctgcaaacctcgcaaccgaccgtcagccgcgagctggcgcgctttgaaaagctgattcggctgcagctgttcgaccgggtgcgcgggcgtttgtcccccaccgtgcaagggttacggttgttcgaagaggtacagcgctcctattacggcctcgaacgcatcgtcaacgccgccgccggcatccgccagtttcagcaggcgcagctgtcgatcgtgtgtctgccggtattctcccaatcgctgctgccggcggtgtgccagccctttatcgaacgttatccggaagtcagcttcagcgtgatcccgcaagagtcgccgctgctggaagagtggctgtctgcccagcgccacgatctcgggctgacggaaaccaccctcacgccggcgggcaccgaacgggtgacgctgatgacgttgaacgaagtgtgcgtgctgccgacgggccacccgctgctggtaaaagaccaactgacgccgcaggacttcgccgggcagaactttatcagcctgtcgagcaccgacagctatcgtcacttgctggatgcgctgttcggcgaacagggcgtcgagcgccgcatggtgatggaaacgcacagtgcggcgtcggtgtgcgccatggtgagagccggcgtgggggtgtcgatcgttaacccgctgacggcgctcgactatgccggcagcggcgtgcacgtgcggccgttcagcatcgacgtgccgttcaccgtcagcctgatccggccgctgcaccgcccttcatcggcgctggtcacggcctttatcgaccatctgcatcagcaggcggcacgcttctccgcccggctggccgccgctgtcagacgctgaaagcggccagggaatattgccgaggccttagcgcagcgtcgcctgccactgcggatcggtggcgaaccactccaccagaaagtccagcatggtgcgcaaggtggcgggcatctggcgacgcgaggtgtagatgccgtagatgcccatcgactgcggccggtaatccggcaacaattcgaccagttcgccgctggccagcagcggggccgccgaataatagggctgcatggaaatgcccgcgccctgcaccgtgccggccatcaacaccaccgactcgttggcgctcaggttgccgctgaccgccaccgccgatttcaccccctgagcgtcgaagtgccacaggcttttgccgaaataggagtaggtcaggcagttgtgcaacgccagatcctgcggctggcgcggggtgccgtgtgccgccagatacgccggcgcagcgcacaccaccgatgcacaggtggacagcggacgggcgatcaggttgggatccagctcgttggtgatgcgcagcgccagatcgatgcgctcttccaccaggttcaccgcccggttgttcatctgcagatcgaccgccacctgcgggtgacgcttcagatactgagcgaccgcccccaccagcgccgtttgcccgagcgactgcgaacaggtaatgcgcagcaggccgcgcagttcgtcgctctgcccttcctccaccaggtcgatctcccccgccagcgccagcatttgtcggcaacgttccagagtacgctcaccggcatcggtcagactaagcttacgggtagtgcggtgcagtaaacgcgcgccggcccattgctccatctgcgccaggtagcgagtgaccatcgcgcgcgacatctccagcgtttccgcagcggcgatcatgctgccgcgatcgacgatggtgacaaaaacctcagcggcggtaatgcgatccatgattagtccgatttatgcaacgaataattgcttattatccggtttttctatcgctttatgcaacctaacatcattacaacattaaccgatacctaaggacctctgcccatgtttaagaaatcactgttaactctggccttcaccggcgtcgccaccctgagcacctacgccaccgctgccgataccctgaccatggaagtgtataacccgggcgagaaaagcgtgttcccggtgtcttccgaaatcatcagcggccaacacgaagtggcgctgatcgacgcacagttccagcgtaacgatgccgaagagctggtgaaaaagatcaaggcgaccggcaagaagctgaccaccgtttatatcagccactcagacccggatttctacttcggtctggacgtgattaaggccgctttcccggaggcgaaaatcatcgcttcgccaggcaccatcaaggacatcaacgccaccaaagacggcaaagtcgcctattggggcccgatcctgaaagacaacgcgccgaaaaccgtgatcgtgccgcagccgctgcagggcgacagcttcaccatcgacggccagaaagtggaagtgaaaggcctgaacggcccgacccccgatcgcaccttcgtctggatcccggcgctgaaagcggtcgtgggcggcgtcgcggtcgccggtgacaatatccatccatggatcgccgataaccagaccgtggaatcgcgccagcactggcagcagacgctgaaaaacatcgaagcgctgaagccgcaggtcgtcgtgccgggccacttcctgccgggcgccgcacagacgctggcatcggtgcactttacccaaaaatacctgaccacgctggaggccgaactgccgaaagccaaggattccgccgcgctgattgaagcgatgaaaaagcactacccgatgctgaaagacgaatcgagcctggaactgagcgcgaaagtgctgaaaggcgagatgaagtggccgcaataagcgcccgtgcgtgattgaaccagccctggcgccgcggcggcttgccgcgcgccaggcgaggagtaaaaatgaccgaaaccactctgcattacattttcgatccgctgtgcggctggtgctacggcgccgcgccgctggtgaaagcggctcaaagtctccccgggttgaaggttgtgccgcacgctggcggcatgatgaccggtaacaaccgccgccaaatcaccgatgaatggcgcaactacgtcattccacacgacaaacgcatcgccgagatgacgggacagccttttggcgaagcctatttcaacggcctgctgcgcgacaccacggcggtgatggattccgaaccgccgatcaccgctatcctggcggcggaaaagctggcgggacgcgggctggacatgctgcaccgcattcagcaggcgcactatcaggaaggccggcgcatcgccgacacgccggtgctggaagcgttggcgaaagagctggggttgccttcggcggcgtttatcgccgaaatgcgtttcaacagcggtgcgccgaccgcgcaacacatcgcggaaagccgggcgctgctggccaaagtgcaaggccagggcttcccgacctttgcgctgcaggatagtgatggccgcctgcatctgctgccggccggcaattatctgggcaatgtggaagcctggaagaacctgctgggcgccgccgcgctggcataaccctgctcgccccgatcgtcggggcgggtcattctacccgcacgaaccgcccttccgcccgcacgttgtgaccgaacccgcaatcgccccgcgtgtgcatttccaacgcttgctcgccaaactccatcgtcacgtcgcagacctgcgcgctttccgcttcatgctggtggtagacagccttgccgtgttcgatcggcagctcggcggagaagtcccccatgttcggcccgtaatacagccccatctgcggcatggcgtagccggagaaatcgatcaaccagcgctcgctctgcggcttcaccgccacttcgctccacacgcctcgcccggcgtattgccagtacacgccgcccggcccctgcggctgcggccgctgcgccagccgttggcgcaacaggctcaggttgtgctgcgatttgtcatcgtgcggcgccagcgccagataggcctgcgccttgagcaattcgccggcgtgcatcagcgacagcgccacgttgttgtaagccgtggcgacagcctgctcgctcaggccgcaaaactcgctccaggccgcctgatcgcgaaagatgtcggcggctttggcgtaatcttgccgctgataggccttttttcccagttcggcgtagctcgccaccttttggcaatcggcggcgatgtccggctcgtcaatgtgcgcccaggcccgggcgctggcgaagacgccgcaggtcagcaacaggggaaaccaagccttcatcgtttatcctttctgcaaaaattcggcgccagtataaccgccctgcgccggagtgtatgccgcaattgcgcccgccaacgcgccgctggcgattcagccgccttatttcaaatggttagcggagtcaaaactgcttacagtcgcggtttgtttgttaccggcccgcagcccatgctgaacaaaataccgcaattatcgagccgttatgaacgcaacccccttgcagaaacacgccgtgtggcagctgatcaaacccttttgggtgtctgaggagcgatggcgcgcctgggcgatgctgatcgccatcgtcatcctgtcgctcggtctggtctatatcagcgtgcagatcaaccagtggaaccaggtgttctacgatgcgttgcagaacaaaaactacccggtgttcaaagcgcagctgtggcgcttcacctatctggcgctgatcttcatcgtgctggcggtctacaagatctacctgactcaggggctgcagatgcgctggcggcgctggatgacggaaaagttcatgggaaaatggctggcgcaccaggcgtattaccacactgagcagcagcagatcgtcgataaccccgatcagcgtatcgctgaagatctcaacgtactgacccaatataccctgtcactgtcgctcgggctgctctccagcctggtgacgctgttttccttcatcgacattttatggcacgtcagcgggccgatgaccttcgcgctcggtcaacacgccatcaccttacccggctatatggtgtggttcgcgctgctgtatgcggtgctgggatcgctgctgatctggtgggtcggcaaaccgctggtcatgctgggctttaaccaggagcggtatgaggcgaacttccgtttcggcctgatccgcatccgcgaaaacaacgacgccattgcgctataccacggcgaaccgcgcgaggcgcaacagttgggtgaccgtttcgacaccattcgcagcaactggtgggcgatcatgcgcatcacccggcggctgaacatcgccaccaacttctacggccagttcgccatcgtgtttcccctgctggtggcggcgccgcgctacttctccggcgccattcagatgggcggcctgatgcagatcgcctcggccttcggccaggtgcagggtgcgctgtcgtggtttatcgacgcgtttaacgacttggcgacctggaaagcctgcgttaaccgtttggccggcttcaacgccgccgtcgatcaggttcaccatcagccgcgcggcattcagttgcgggaagagagcgcccatccgttgacgctggataacctcagcctgaacttgcccgacggccagccgctgctggccggcgccgagatgacgctgcaacgcggcgatcgcctgctgatcgtcggcccttccggctgcggcaagtcgacgctgctgcgggccatcgccggtatctggccttacggcgcgggcgccatcggggtggcggccaacgccaacacgctgttcctgccccagcgcagctatattccgatcggcacgctgcgcgaggcgctgagctacccgagcctggcgtcagaatacagcgacgaacagttgatgcgggtgctggaaaactgccgtctgaaacacctgcagcgctggctggatacctccgccaactggagccatcgcctgtcgccgggtgagcaacagcggctggcgttcgcccgcgccctgttgattcgcccgaacctcctgttcctcgacgaagccaccagcgcgctggacgacgaaaccgagcaactgatgtactgcctgctggtggatgaactgccggacatgacgctgatcagcgtagcgcaccgcaacagcgtggctaagtaccaccagacctgctggcgcttcagccgcggcgaagaccaaccggcgcgcctggcgctgagcccgttgccggcataactcacgaagccgggcgcaagcgcgcccggttttcgttcagatgccatcggcctgcgcgtcttcgcacttcacccggcggcgttcatgccacaggctggtcagcccgcgtttaccgctcgccagcgccacctcgcgaaattcatccaggctcagtccgtcacgttccagcatcatttccgccgccaactgcatgttgacaccggtcagcacttcgcaatcgccccgcgcatccgccagctcgcaggcgctacgaaacggcgaaccgccgagcatgtcggtgaggaacaccacgccgtccggctgcgccaccgcggccagcgccgagcgtaaggcgtcgttgagctgcgcggtgctcatctgttcggggaaatcgaccgccgcgcagtgccgctgcggccccaccacctgttccaccgcctgcaacagcccggtggcaaagccgccgtggccggtaatcacaatgcctggcatagcccgctcctcacaaaataccgataaatttgcccgccacgccgatgactacggtgacgccaatcagcttcaccggcgagaatccgcgcttcatcaggaagaaaatgagcagcgtgaaacacagcggcaacaagttgggcatcagcttgtccagcacgtcggtctgcagcgccacgctggccttgccggcatgcatcaccagcggcgtggacaggtgcacatacgaggccaccagcgcgccgatcaccgtcatgccgacaatggaggcagcgtgcgaaatgcgccgggtgtgggtcttcagcagcgccagcgcgctggtgccggcctgatagccgtagtgcgccagcccaaaacgcaggccgaagtggaacaggttgaacagcagcaggaagacgatcggcccgaacaggctgccctccaatgccagcgaagcgcctatgccggcgcagatcggcagcagcgtcagccaaaacagcgcgtcgccgatgccgccgagcggccccatcagcgccactttcaccgcgcgaatggtggagattttctccttgttctgctccatcgccagcaccaggccggacaggaaggtgacgtcgaacgggtgcacgttgataaattccatgtgcatcttcatcgagttggccagatcctgcgggttgcggtggatcttgcgcagcccggggatcaactgatacagccagccgcccgcctgcatgcgctcgtagttgaacgacgcctgcaacagcagcgaacgccaggccatgcggttgatgtcgccgcgcgtcagcgcttcggcgggctggctgtccagataatcgtcctgttccacctggctggtggccagcgcctgcgccatgcgctgctcggctttttgcgccagcagatcgtcggaatcgttaaatgccatcttcggcgtcctcctgcggagcgggccgggtggttgcctctgccgcgccgcgttgcgtgttgaagaagtcgatcagagcgatcgccagagcccccagcgccaccgccaggatcggcagcttgagaaacgtgaccgagatgaaaccgaggataaaataggccacgtaggtttttttcatcatcactttcatcagcagcgagaaaccgatcgccggcatcatgccgcccgccaccgccagcccgtccagcagccagcccggcgccttctgcaccatggcgctggccgcatcggcgccgaagtaaatcggcaggaacgccaccacgaaatagaagatgaacagaatgctgatgcccaggtaattcacccgttcgataccgcgccagttcagcgctttcaccatgcgatcgcagcggtgcatcatcggtgaaaacagcgtaaacagcagcgtgatgcagccctgcaccgcaatcgagaacggcaccgccacgccgatcgccactttaggatcggccttggtcagaatggcgaatgcggtgccgatcaccccgccgatcaccacgttcggcggttgggcgcccgccagcggcaccatccccatccacaccagctccagcgtgccgcccaccagcaacccggtatagacatcgcccaaaatcagccccaccagcggccccatcactaccggccggtggaagtgggtcagaccgtcgaacaggtcaacccccgccagcccggccaacagcgcaatcaataacgcatccgtcaacatgctttccccctggctcaaaagagcagtttgccgatcgactcgcccgcttcatccggcacccggcgcacttcgcactccacgcccagctccgccagcgcgcggaacgcggccacgtcgccgtcgtccagcgacaccgttttgtgcacctgccgcttcccctcggcgaagtgcatattgccgacgttgacgaaacggatcggcaccccgccgcgcaccagcgtcaacacatcctgcggcgttttgcacaccagaaagatcttctgccgatccgccgccttgtggatcacgtcaatggttttctgcagcgtgaaataacgggtctgcaccccttccgccaccaccatgtccatcaggttctgctgcaccggatcggcggcggcctcgtcgttggccaccaccaccaggttggcgccgagggtattggtccaggtcacgcctacctggccgtgcaccaggcgattgtcgatgcgggtcattaaaatgttcggcatatcagcggccctccgggtaacaggcggcgtggtaatcgtcgagcacctgcgtcactttatgcagcacccactcctgcggatcggcgctcaattcgccggcgttcagcgcccgcgcctgatccggcaggtactggctgagcagcgccagcggcgccgggctgcggcgcaggttgtccagcaaaccgtcgaccgcctgctgcacctgcggctgcggccagtagtaacgcacccgatcgctcaggctgtagtggcgatcgaggtactgttggtgcggcgtgccgtggtaatagcggctccactgctgcggctgctcgcgcatcacctgctccagcgtggcgcacagctgcgccgactggcgttcccccagccattcgcgttcgatgcgatcgagggcgaacagcgcttcgcgcagcgcaaaggtcagcgccggccccaccttcaggatggcgaaatgatcgcgcaccagctggcggtaggcctgcggcggctgatagtccgtggagtgcgcttcatagatcatgcccggctgccgttcaatgaaatggctcaatgcgtcggcgcgctgtggctggtagtgctcaacgctgtagtgatcgaactcaacgcccggctgcaccaccagcgcaatagttcgctgccaggcatcgttcagctcggccttttgccaggcgatacgatgtgtttccagcgtttgcgccaccgcctgcggcgtggtgacctgtagacccgccagcgcctcctgcgcgccgcccggcaccggcacttcggtgccgatcacatagaccggcgcttcgccgccgctctgcgcccaggcgcgttccgctaccgcgcacaaacgcgccgcccgctcggcaaccgtggcatcccccagatgcgagggatcatcggcgcacgacatggaacaatcgaggtgaattttgcgaaatccggcgcgaacgtaatcgtctatcaaggtttccgccagcgccatcgcttcctgagccgggcgatcttgccaagcgttgggccccagatgatcgccgcccagccacacgcgctcgcgcgccaggcccacttcatccgccagacgccacagcgcatcgcgaaactgggccgccgtttggccggtatagccgccgaactgattgacctgattggacgtcgcctccaccaacaccggcgtgccacgcgctttggcctgccgcagcgcggccttcagaacccagggatgggcggaacagacggaaaagatcccgaccggcataccggccttgtgctgctcgacaagctgtaacaactgctgcatgaagcccccatgcaggcgccgtgctaccgatcggcgatgatgacctcaacgcccagctcggttaacgcccgctcgtaatcgtccggaagacggctgtcggtgatcagccgatggatttgtccggcttcgcgaatcatgcaaaagcttttgcgaccaaatttgctggcatccgccaccgcgataatctcacgcgccacctcgcacatcacgcgattgaggtgcgcctcaccggggtgaggcgtggtgatgccggcgcttagatcgaacccatcgacgcccaaaaacagtttgtcgaagcggtactgacgcaattgctgctcggcagccggaccgtagagcgagtaagagttgcggcgcacgctgccccccagcaccatgacttccaccccgtcgtttcccgaaagctcgtaggcaatgttcagcgcattggtcatcaccaccagatcgcgccgtcccttcagaaacggcacgatctgcgcggtggttgaaccggaatcaaggatcagcgcatcgccgtcgcgcacatagccggccgccgcgttggcgatcagcgttttgacgtcgcgattcaaccgccctttgtcccgcagcggccgatcgaaagcgaattgctgattgagcatcgcgccgccgtaagcgcgcagcgcacacccttttcgttccagaaagcgcagatcgttgcggatcgtcaccgtggataccgcaaactgtttgctgagctgctccacgcgcacgctgccgtgctcgcataacagatcgataatgtgttcacgtcgctttgcggtattcactggcatgagctgcggtcctcaggtttccggcatcgccggggagaagatggctttcgctctactgcgctggcattacagcaaagcgaaagcaatgaaattgtgatcgggcttacagccccgttttagcaaaaaaaccgccaaaaaacctttcgaatcgaaacggatcgaaaagcctaaaagcggaaggggggaaaagtgaaatgccatgacgggcgataacccccggagcgctgaggcgtgggctgcacggaaagcgaaagcgacgcatggtgcgccccgcgccatgacttttagttcactcagtgaccaggatcacataatggcaattatccgtcggccggcggggattaaccgccgccatcccgccgggccgtccccttgtcagcacgagacatcttccctacactggcgaacggataccgtcgattttcggtacgtaagcgttaacgtcaatcaacgcatcacgccatgcagcactgattgactgcatgccctggtgcgaggaacccatgccgcaacccgcttcacccccagcgtccaccgtgaccccgcgtcgccggttacaccgccctattctgctgatcgtcggcattatgctgatcgcggccaatttgcgcgccgccctgaccagcgtcggcccgctgctggagcagatccagcaacagctggcgttgtccgccaccgccgccggcctgatcaattcgctgccgctgatcctgttcgccatcctctcgccattgaccccgacgctggcgaaacgcatcggtatcgagcgcaccctgggcctcgccctcgcgctgctgatctgcggcatcgccctgcgctccctgccgcaagacgccatgctatggccgggcagcatcctgatcggcgccgccatcgccttcgccaacgtggtgctgccgacgctggtgaaaagagatttcccacatcgcgccgccgcgatgatcgccgcctatgcggcggtgatgtcgctggttgccgccatcgcttcaggtttggccgtgccactggcttcgctggccgaccttggctggcggttctccttgttatgctggggcttgcctgcgctgttggcgctgctggtgtggttgccgcagctgcggcgctccgccacacccgccactaaagagccgcagccgacggagccgcaacgctatcgctctccctggggcagcgcgctgggttggcaagtggcgatgttcatggggctgcaatcgatcgccttctacaccatcatcggctggttcagcgcttttgccgccagccacggcacctccgctcagcaggcgggtttcgaactgttcgtttaccaggtggtggcgatcgtcgccaactttgtcatggtggtgattttgccgcgggcgcgcgatcagcgggcgatcgcgttgggcagctctctgctgatcttcatcggcgtcgggggattattggtgcaacccgccagttcactggtgtggctgacgtttgccgggttgggggcggggagttcgctggtgctggcgctgtcgttctttggattgcgcagtcagcatcatcatcaggcgacgctgttgtcgggtatggcgcaatccgtcggttatctgttggcggcgctggggcccaccctattcggcctgctgcacgatctgacggaaggctggcgcttgccgttgatcgccctgctgggcctgaccgtcttgcaaatgctgttcggcgcgctggccggccgcagccgcgtgatcagctaacgctgcggcgcaatgggggccgcacgggctcagagtcggtgtcctgccataaatcatcaataaaggcgcgctgctcatcgctcagcacccatgacggcggaattttggactgtgcgcgacgctcagcgccctcacggtttttagcctgctttttgttcacgaatcgccttcctgcttaacctgctaactcagtaaccagtaaatcacggcggcggttaacagccagaacagcccgctaccgataaacacacacagccatgctctacgtttgatatccgatccatccttgctcaccacagcgcccccaaccaatagattaaaccactcaaacagcaattattgatctgttttaacgatcgataaagtcgttttttcctatggaaatttaaaaaacagctgctagccatagacctgcatcaccgcctcagtaagaacggcaccgtggatatcactgttatcggcaggcgataacttgaattgataggcgaacgaacgtgcagtgtgccataccttgaaaggtcaaaatcaaaccactggtaaataattcaaccatcaattatttgactggtcataagccaaatcggcaacagacagcgctgaaggcgggggataaaatgaagcgacgcactgggatcatacggtgagaagcaccggcccgcgttggtctcgctcgggccggcgtgagttaaccgattctgctgacggaatcccggctggcgtgttcacgctcgctgccggtcagctcacgtaaatgacccgagcgcatctcaagcagccgatcggcatgttcgaaatagtgatcgtcatggctgatggcaaacaccgttttgcccagcgcgcgcagttctggcaacagctcgcgatagaaaatgcgccggaattgcggatcctgatccgcggcccattcatccaacagcaagatatcgcgctgttccgccacggccagcagcaaagccagacgcttgcgctgcccctgcgacagttgcgggttggtcaccctggcgccgtcgaactgcagcttgcttttcatattcaaccgctcgagccagccggcgaccagttccgcatcgggttcgccgccttccggcccttgcaaacgatcgaactgatgaaaatcggtgaaaatcgccgaaaacagccgacgatagtccggcatatccgccgcgctctgcgcgacgccatccagaacgatgtgcccgctcaccggccggtacaacccggtcaacagcatcgccagcgttgacttgccgctgccgttgccgccgatcaaaaagatcagctcgccacgccgcagcgtcagattaagcggcccgacggcaaaaccgggctgttgctccgtatcggcatagtgaaaaaccacgtcgcgcagctccagcgtctgccaggaacggccggcggcggcagggaacgccggttggtattcggccaggcgcagcgtcttcagcttgttgaaagcgacttcggcgctgaccagcgtcggaaacgccccgaccgcctgcagtaatggcgtgcgcaagaacagcagcgtcagggaatacgtggcggccaccgccgagttcgcccatcccaggctgttagccataaagaacaccagtccgatcgcccccaacatcatgatatttgaccagttgagcgcactcagatggaaggtatcggcgcgaatgatatggtggcggtaagcttgcgcatcgggttgataggtctgttcgtacagcgcctgcgctcgcttgcggtttaacgtcagttccttgcgaccgtcaatcaccgattcataatgatgatagagacgctcttccgactcgcgcaaactggccatatggcgataaacccgcgagaccaggcaaccgctgcccaccacggtgaccgcgacccacaccgccgtcaccgccagcattttcggtgatagccaccccagataggccgccgaccccagagttaaaatcaccccttgcaccagttcgggcaagcgcacgaaggcgacggtgatattgcggacatcgctggagagactggccaacaatgaggcgctgcctaactgttcaaggcgttcaatatcggtatccaggatgcgcttcactaactgcccgcgcaggcggtagacgaagtaatggcccaatgtcgtcagcgccaattgcgatcccagcgtgaccgccatcagcaatgccagcagagcgagaaacatcggcagcacagccaatgcatcgccgccggcgtccatcaggtattgattgataaacgcaatgataccgatgcccaagccagcgctggtcatggtcaatgccataaccgccagaaatggccaacgatactggtgataaaccacccgtagcagttccatgaaaaacctctgaagtcgcgatctggcaggcattgtaagcggcgcgagaatgagatcaagacgaattctcattgctcgcgcagcctctgaattcgacgccaagggcattttgatgattgcttattgaaacgagagacttacactggcgccacttgccgctgaagggaacagccgattatgctcgccactcacgaatacgccaacgacctgattctgtttgccctgattgtcgactgcggctcgttcagcaaggccgcggagagcgccggcatcaccagctcggtggtcagcaaacgcatcgggcggctggaaaaatcgctgggtgcccgcctgctgtaccgcaccacccgcagcctgacgctgaccgaaagcggccaggcgctctaccagcaggccaaagagatcggcgccaaagtgcaggaggcgctgtacgccgtcagcgaaaagagcgaagagttgaccggcaccatccgtatgtcggtgccgaccatttcgggcgagctgttgctgagcgaaagcgtggcggaattttgcgccctgcatcccagcctgaaggtcgaaatgcggctggaaaaccgcttcgtcgatctggtggaagaaggcatcgatctggcgatccggaccggcaccatgccggattccagcctgattgcccggccgatcttcgattcccgctgggtgatcgtctgctcgccgggctacctggaaagccacccggaaccgcgcagcgccgacgatctgctgagccacaactgcctgacctacacctaccaggagagcggcaccaccaactggctgatgaagcggccggggcgcaacgacatctacgagctgcaggttaacggcaacctgtcggccaataatgcgcgggcgatccgcaaagcggtgatcggcggccacggcatcgccatggtgccgcgctgcatggtgtatgaagatttgcaggacggtaaactgatggagatcctggccggccactgcggcaaagtgctgggcatttacgccgtttatccttacacccgcaatctgccgttaaaaacccgtctgctgatcgaacatatcatcggttcctaccaaaatatcagccattatttttgagttccctgctctgattatttccctgcggccgtaaaaagacgcggggattaccgcatttttggacatgaactattgaacattaccgcttaattaatgtgagctcacgcattcattacacaaaattacttcctatcaaactgattttaaagcagttaatttaacgcctcctgccggccagtttcccaccgccggcgccgttcgccgatgttaaaaaattaccgcatggcatcgtcgccaacgttgtgattagaatgaaaatgttgcggtaattaacctttcagctacatatctctgcccataaaaataataaccctgaggatcttatgcccctgcttttcagtattgcgcccatcgtcctgctgatttggatgatgaccaaaaggaatggcgtgccctcttacctcgccctgccgctgacggccgccgtggtgtatgccgtacagctcctgtggttcgatgcctcgctgcggctgctgcatgccaatatcatcaccgcgctggtgtcgacgctgacgccgatcaccatcattgccggcgccatcctgctcaacaaactgatgcaggtaagcggcgcggaaaacgtggtgcgccgctggctggaaaccatcagccccaatcccgtggcccaactgatgattatcggctgggcgttcgcctttatgatcgagggcgccagcggcttcggcaccccggccgccatcgccgcgccgattctggtcgggctgggcttcaacccgctgcgcgtcgccctgctgacgctggtgatgaactcggtaccggtctccttcggcgccgtgggcacccctacctggttcggctttgccaatctcggcctgtcggacgcaagcctgctggagatcggccggcaaaccgcgctgatccacttcgtcgccggcttcgtcattcctctgctggcgctgcgctttatcgtttcctggcaggatatccgccgcaacctgccgtttatcctgctcagcgtgctgagctgcactgtgccctatctgttgctggcccaggtgaactatgagttcccggcgctggtcggcggtgcaatcggcctggcgctctcggtgctgctggcgcgcggcggcatcggcctcgcccgcggcgacaaaccgcagaacgccgggcaggcggtgccgttcatgcaggtggtcaaggccatgaccccgaccctgctgctgattgctattctgatagtgacgcgcgtccaccagctgggcctcaaagcgctgctcaacaacaccgcgctgctgtggcgggaaaacctcggctggctcggagagctgcgcatcagccgggcgctgatcgtcgaactgcagcaggtgctggacacctccgccgccgccggctacaaaacgctgtatgtcccggcgctgatcccgttcctgttggtggtgctgctgtgcattccgttgttccggctgaatggcggccaggtgcggcaaatgttcagcgaaaccggcgggcgcatcgcgcggccctttattgcgctgttcggcgcgctggtgatggtcaacctgatgatgcagggcggcgacaacgcgccggtgatcctgatcggtaaagcgctggcggcgctgaccggcggcagctggctgctgttctcgtcgttcctcggcgcgctgggctcgttcttctccggctccaataccgtttcgaacctgacgttcggcggcattcagcagtcgatcgcccagagcagcggtcttgacgtcaacctgacgctggccttgcagtccgtcggcggcgccatgggcaacatggtgtgcctgaacaacattatcgcggtctgttcgatcctcgggatcggcaacgccgaaggcaaaatcatcagaaagaccgtactgccgatgctggcgtacggcgggattgcggccggtatggcggcgatcctcacgctctgaccgacaactcgttatcgcaagcaagacaagaaggtaaacactatgatcatctccgcgtcaaccgactaccgggccgccgcccgggccaaactgccgccgtttctgtttcactatatcgacggcggggcctacgcggagcatacgctgaagcgcaataccgcagacctggccgatatcgccttgcgccagcgcgtgctgcgcaatatgtccgaactcagcctggagaccacgctgttcggtgagcagctggcgatgccggtggcgctggggccggtggggctgaccggcatgtacgcccgccgcggcgaagtgcaggccgcgcgcgccgcggccaaaaaaggtattccgttcacgctgtccaccgtgtctgtctgcccgatcgaagaggtggcgccggcgatcgatcggccgatgtggttccagctctacgtgctgaaagatcgcggctttatgcgcaacgcgctggagcgcgccaaggccgccggcgtgaaaacgctggtgttcaccgtcgacatgccggtgccgggcgcccgttatcgcgacgcccattcggggatgagtggccctaacgccgccctgcgccgcgtgctgcaggcgtttacccatccgcagtgggcctgggatgtcggcctgttcggcaagccgcacgatctgggcaacgtctcagcctaccgcggcaaaccgaccagcctggaagactacatcggctggctgggcgccaacttcgatccgtctatttcctggaaagatctggagtggatccgcgaattctgggacggcccgatgatcatcaaaggcattcttgatccggaagacgccaaagacgcggtgcgcttcggcgccgacggcatcatcgtctccaaccacggcggccgccagctggacggcgtgctgtcgaccgcgcgcgccatgccggcgatcgccgacgcggtgaaaggcgacatcactctgctggccgattccggcatccgcagcggcctggacgtggtgcgcatgatcgcgctgggcgccgacagcgtgctgctggggcgcgccttcgtctatgcgctggcggcggccggcgaagccggggtggctaacttgctggatctgatcgacaaagagatgcgcgtcgccatgacactcaccggcgcgaaaaccattgcggagatcaacgccggatcgctggtcagaaacgcctgactcacagcggctgcacgccctccgggtaggcgttgtagctcatcttgctgatgaacgccccagccggtgacaccagaacccggccggcggcgtccaacccgaggaaggtgccggtgcagcgcccggagataaagtcgaagaagaacaccgagcacaccgggataatcttttcccggaaggtgaacaggaacatctcgtcctcaaacttgtagtaagtggcgtaatccatgtcgccgtgcccgaactgctcgccgcgcaggttttgccaggcataacgctcggtgttgacgtagaagtgctcgtagtaatggttggggctgtaaacgttcagcgtgcgataaccgatcagctcgcgggtcagatgcggcgcgatgccgcccggcgtaacgccggcaatcagcccaacgtggaagctttgcttgaggcgggatcccttttccaccgtttgttcgggcaacagcgtgctgcgcaccagcagcgcccggccgctgtcgcggttgagcaccagcgtcaggcattcgttgcccggcgactgcaacggaatattgaagaaatagcgcgcggcggaggtttgcacctcttcgtaagcgtcctcaccgctctcccctccccaggcccacagcacccgctgccgatcggcgctgaaacgcagcgtgatttccccgccgtcttcaaaggcgatctgcaacgttttgccgcgccagtcctgagtgcccggcagccggttggtgtcgatgccgcgcgcaaaatcgtcgtaattcttccagtccggttcggcattttgattcagtacggatggttctgctgacatcttcgctctccttgattgaatgggatgaaaaccgcctcagacgtcggcgatgcccgccggtttcaccgctcggcggttcaccacggcaggggcagtttcatcgagaaaacaactcagtacgccggcgcacacggcgccggcggccgccagccacatcacgctgaccagcccgtagcgatcggcgatcagcccggcgataaacggcgccaggcagccgccaatcacctcgccaattcccatcaccagccccaacgcggtagcgatgcgcgccggcgacaccgtttcagacgggatggtggccataaacagcgtgaaacagccaaggccggtataagacaggaacaccagcacgcccagcagccacgggttatcgacgtagctcagaaacagcgggcagcacaccgccagcagcgaaaagaagatcagcgtcggcttgcggccgaagcgatcggaaatcgccggcaccgccacgccccagaacacccaggcggcgccgatggcgctcatgatgccgcccatcgtgccttcgccgaagccgcggtcggtcaccaaaaagttgggggtgaaggtaatgatgatcatgaaccaggtgacgaacacacaggagatcagaatgcacagcgccacgttcttgattttgaacagctcgccgtaagcacctttgttcgccgtcttgtcggccgccggcactgcgctgaaagcgggatccttcttgccgttcacatagcgatagatcagccacgccagaatgatgcccggcacggcggtcaggtgaaacgccatgctccagccccacttctgcgccagatagatgatcagcggcggcgcgataataccgcccaacaatcccggcgccgccccttggatcaaccccatgttgaaaccgcggcgctgcggctgcgatttttccaccatcaacgactgtgcgatcggcaataccggcccttcggcgatccccatcaacgcccggaagatcaatagcatggcaaagccgctgaccaaccccgacagcgcggagaacagcgaaaacaccaggatcgacaggatcagcatcggtttacggatattaaaacgatcggctatcgcccccagcccggcgccagacagcgcccaggttaacgccagcaccgccgacagggtgccgagatgcacgttgctgagcttgaggtcggcggcaatcatcggaaacagaaacgagatggtcagacggtcgacaaacacgcagccgaaaacgaaaaataaaataatcagcaaccggttctcttcacttaatgcgctgcgaggctctggcgatgtattcatagcgtcatttgtccataagttaacttatgaatggcgacccgccatggcataagtgtgttaagcactcggccaagagagaaattggccctccgtcacgacaacaactcattaacatgttaatgacataaaattatcgcaagccggcggtctgtcaaccggcgctttcttagagacgaatgaagtttttgttcggtactattttaaaatcgcattatcacaaaaagatattttacccttctgtttttacagccaataaaataataacgggtatttttcttcggttaaaaacgcctattttcacgccatttgcgaataatctcaacgatcactcttcaggcttattaattttttacccgtattgaatgaacgctggggaatattcagttttatttttatctattgaatcatttagttttattttattgccgcacaacaaactaactcttatgagggaaaggctattggcagagttacataatttcatctggacaatagcaaaagcgcagagcgtgacgtaaatcacggcaatcatgccgtatcctgtaaggtaattatgctcgcaacagcaattatctattgcgattagggctgtttatctcaattaatcgtcatgcaacacttcgtgccatcgttcgacaccgcgccgcaaggcctgagacggagtgacacatgagcatcgaaagactaacccgggagccgctttccatcggtattgagctgccgttggacaatgattggtccaccagcgggcagctgaaacgccagcaggacgggcggccgttcggcgtaccggacatgagtgaacacgctgcgcgcatcaagctggccgatgagctcggctttcgcgccgcctaggttcgcgacgtgccgctgtacgatcctgacttcggcgacgccgcgcaggtgtttgagacctttacctacctcggctacctgtccagcctgacgcgcaatattctgctgggcaccgcggccgtggtgctgccgctgcgccagccttggctggtgcgcaaagcggcttccacgctgcaaacgctgagcggcgatcgtctgctgctcggcgtcgccagcggcgatcgccccgtggagtacccgctgttcggcgccgattacgccgcgcgcggtgaaaacttccgcaccagcgtcggcattctcaaaggtgaagccgacagcgcgctacagcccggattgcgcctgctgccggccacgccgccgccgccgctgctggtcgccgggctggcgcaacaaacgcccgagtgggtgggcaaaaatatggatggctggctgtcatatcccggcacgcctgcggaccacgtttcgcgagtcaaactctggcgtaacgtagccggtgacaagccctacgtcagctttattcatctcgacctcaccgataacgccgacgcgccgattcagcgccatcgcttcggcatcaagagcggccgcaatggattgattcaggaactgagcgccatgcgtgacgccggggtcaaccacatcggcctgcatttccgccgcaaccagcggccgctggaagagacgatgcaggagatcggtcaactggtgttgccggaattccatcgcgcctgaagcccgctttagcccgctattccgacctgagcgggtctttgccccgttaccggggcttttttatttccgccgctgctagttcataacaactcagtctaatccctgcggccaaacggcggcatgatgacggggaaacgagccaccatgaggaatgagcaatgacggcaaaactgacagaagcgggcttttggcgcaaaaccgccgactcttcatcgctgcgcgagccgcgcgtgctgatccgggtctacgtcgacgaaggcgagattgaccgcgccattgcgttttacgagcggctgcacggcgtggaagcggatatgcgtttcgactttcccgaacatcggctggtgctggcggcggtggggccgtttctgatcctggaaggctcggaagaaagcctgcgtcctttccgcagcaccgtcggcacgttgctggtcgatgacatttatccttaccaccagcggctgctggccgccggggccgatatcttctttggcccggtggacgtgcccaccggcgcctgtttcaatgcgcgcctgccggacggcacgattatcgaatacgtgcatcaccggccgcgcgcggacgaataagccgcctcaagggagcgccggcgtcatggcgtaaccgcgcagatccttgcgcaggctgaccatgtacaacacgatcaccgccgagaacggcaggccgcacagcaccaccgcggtctgcatcgcgctgaaactgccggcgtacagcaacccggcgcagatcaaggtggtgaccgccgcccaaaatacccgcagccaggccggcgcgtcatcgtgggcggaaccgccctggcaggagaggttcgctatcatcagcgtgccggaatcaaccggcgtcaggaacagcacgaaactgatcaccaccacaaaaccggcggtcagctgggtatagggcaggtattcgaacagcttgaacaccgccatcggcggatcgctttgcgccacctgcccgaggatcgcctgcccgccttccaacaccaggctgatggcggtattgccgaagatcgacagccacgccagcgtgaagcccagcgggatcagcaacacgccgaagatcaattcacgaatggtgcgccctttggaaatgcgcgcgatgaacagcccgacaaacggcgcccacgccacccaccaggcccaatagaacaacgtccaagcgccctgccactggcgcgccttgccgtacagatacatatcgaagctgcggctgaccagcgaagtgagataatcgccgaggttctgcaacatgccgttgagcagattcagcgtcgggccggccagaaacacgaacagcaacagcaggcacaggaagccgacgttgatgttcgacagcatcgcaatgcccttctcgacgccggtgaccgccgccagcgtggccaccaccatcatcaccacgatcagcgccagcagcacgccggtgctttgcggaatatcgaacagataaaacagccccgagttcaccagcagcgcgccgatccccaggttggttaccatcgaaatcaccgtcaccagaatgccgaagctgtccaccagatggccggcgccgccgtgggtgcgctcgccgaagatcgggtataacgcagagcgcagcgccagcggcaggccgcggcaataggcgaaataggccagcgcggtggcgatcagcgcatacagcgcccagccgtgcagcccccaatgcaaaaaggtcagcgccatcgcctgccgcgccgcctgcacggtgccgccgctgccttccggtggcgacaaaaaatgatccaacggttcataggcgccgtagtacaccagcgcaatgccgatgcccgacgagaacagcatcgccacccacgagggatagctgaactgcggcggttcgtcatcctggctgaggcgaatatggccgaagcgcgacagcgccagccagaagacgaacaccatgcaggcgaccatcaacagcatgtagtaccagccgaacacgtcggcgacccaactttgcgcgacgttcaaccactgtttgctggctgcgggaaacagcacgaccagcgatcccagcagcaggatcaccgccgccgagccgaaaaataccgggacattcaatctgacaggttcttcgtcaagcgatggaggagtttttgttgtcattggcaggcttccatgatgcgaaagacagacgatttaaatgcaacctttaattaacattttatcgtcatttatttgacatttccgcagcatatagagtattgattgaccgttcaatcaatcaaatccaaagtgtgattggcctatcagttgaggaaaatatgtaccgaagagacattccggagcagcgtaaggagcagttgattaacgccgccttcgagaccataaacgtcgtcggactggccggcgtcaccctgtctcaggtcgcgaaagaagccgggctgtcgaccggcatcgtcagccactattttggcgataaagaggggttgctgagcgccaccatgcgcaagatcctgcgcgatctgcgcgacgcggtggccgagtgccgcgcgcaagcggcgagcgacagccagtcacagctgttcgccattatccagggcaacttccaccccagccaaaccaacgccgtgtccatgcgcgcctggctcgacttctgggccgccagcatgcatcagccggtgctgcgccgcctgcagcgcgccaacgatcggcggctctattccaatatttgctgccagttccgccgcgagctgccgctgcagcaggcgcgcgacgcggcgcgcgggctggcggcgatgatcgatgggctttggctgcgcggcagcctggccggcggcgagacagacctaaagcaggactgccgcatcgcctgcgactacgtggcgcagcggctcaacgccgctcagccgctgaggtgaacgtgaacgactccgtcagtgcggttcctgctcttcgctgtactgggtttgccacatggcggcgtagcggccgttcgcggccagcaacgcctcgtgccccccgcgctcgacgatctcccccgcctccagcacgataatttcatcggcatccaccacggtggagagccgatgagcgatcaccagcgtggtgtggttgcggctcacctcgcgcaggtgcccctggatttcgcgctcggtctgggtatccaacgcgctggtcgcctcgtcaaacaccaggatggccggatttttcagaatggtgcgcgcaatcgccacccgctgcttttccccgcccgacagcttcagcccgcgctcgcccacccgggtgtcgtaaccgtcgggcagaccgacgataaaatcatggatatgcgccagccgcgccgcccgctcgatttcttcatcgctggagccggttttgccgtaaccgatgttataacgcaacgtatcgttgaacagcaccgtatcctgcggcacgatgccgatcgcctgccgcaggctggcctgggtcagttggcgaatgtcctggccgtcgagggtaatggcgcccccctgcacgtcgtaaaagcggaacagcaggcgcgacagcgtggacttgcccgcgccggaggcaccgaccaccgccaccgtgtggcccgccggaatggtaaaactcacctgcttgaggatcggccgacgcgtgtcgtaaccgaagctgaccgcgtcgaacctcacttcgccgcgatcgaggcgcagcggctgcgcatccgggttatcgacgatctcacgcggttcctgcagcagatcgaacatgttctccatgtcgatcagcgcctggcgcacctcggaataaataaagccgaagaagttcagcggctgatacagctgcagcagataggcgttgaccagcacgaagtcgccgaccgtcatcgtcccctgcgtaatgccccgcgccgccatggtcatcatcacgatcagtccgatcgagataatggcggtttgccccaggttgatcgccgtaaaactgaattggttcttgatggcggcgtattcgtacaaccggcgcgacaggtcgaaacgctcggcctcgaactcttcattgccgaagtacttcacggtctcatagttcagcaggctgtcgatggatttgctgttggcgtcggcgttggccttgttgagctcgcggcgaaagcgggtgcgccagctgaccgccagcacggtgaacaggatgtagcaaccgaccgtcgtcaggatcgccagcgcgaaccagccgttcagcatatgccacatgatcgccgtgaccagcgagagctcgaacaggatcggcacgatggagaacagcagccgtgacagcaccgtggacaccgcctgagtgccgcgctcgatggacaacgacaatccgccggtctggcgctccagatggaaacgcaggctcagcgcatgcagctggcggaacacccgcacgcccaacaggcgcgtggcgttctggctgacgtggataaacatcacgttgcgcagttcctcaaacagcgcgccgcccacccgcgccacgccgtaggcgacgatcagccccagcggcaccgccagcattttcgccgtctcgccgctcagcgcatcgaccatcgctttataagccagcggcaccagcgtggtgctgaccttggccgccaccatgaacacgaaggccaccaccagataccaacgcagccgcgggttatctttcggccacagatagggcagcaggaatttcagcaaacgggaacgatccatcatgtaatattcatcttctcggtcgggatcgcggcgcacagccgcgcggggttatgagtttggcctggccggcggcgaacgccgcaccattccgttttcctgcagcgataactcagcatcatccgtcaggagaagtggcggcggctcgggcaaagttcaggcatggaggagacaatcacatgacccagacgtatgcaaagcgttttgcgctggtctttgactatatcgaccgccacctggacgaggcgctcaccgtcgaaaaactgagcgaagtggcccacttttcgcgctttcactttcaacgccagtttagtgcgtattgtggcatctcggtgtggcgttatatccagtggatgaggctcaaacgcgcctcgtaccgcctggcgtataacccgctggagccggtgattgacatcgcgctggacgccggttttcaaaacccggagtccttcagccgcgccttcaaacaggcgttcagccaaacgccaagccagtttcgcaaacggccggcctggatcgattggcaacagcgctttcccgagccgaaacacaaaaggaaacaacccatgaaggtagacattctcgacttcccggccacgccggtggcgatgatcgaacatcgcggcccatccgcgctggtcaacgaaaccgccgcacgctttatcgagtggcgcaaaaccagcggcctgtcgccggtcagaagcagccgcacttacggtatcgcgccgcacgatccggccaccaccgaagcgcaggacttccgcttctacatctgcggagaggtcactgcgccgatcccggaggacaacgccttcggcgtggtgaacagcacgctgccggccgggcgctgcgcggtgctacgccatctcggatcgctggatgggctctcggaaagcgcccgctatctttacagcgagtggttgccggccagcggcgaggagctgcgcgattttccgctctatttccactaccacaacttcgtgcacgaggtggcggaatatgaactggtgaccgatctttatctgccgctgaaatagctgacatccggctccgcaaggagccggattgacgttaacaggacggcgacgaaccctgcggcggcagatagcgctgcggatctagcgcggtggcgcgatagcggatctggaaatgcaggaacaccgaatcggtgccggtgctgcccatggtgccgatcttctgccccgctttcacatcctggccgttgcgcaccaacgtggtgtcgttgtgcgcataggcggtaatgaagtcttcgccgtgcttaatcatgatcaggttaccgtagccgcgcagctggttgccgacgtacaccactttgcccttggcggaagcatagatcggctggccgcgtttaccggcgatgtcgatgcccttgttgccgccatcggcattggagtacgcctgcacgatccggccgctggtcggccagcgccagcaacgtgcggcgcccggcggcggcgtttgcttggcgatcgcggaggaagatgttttacggcgcgtggcggcggttttggtcggcgcgctgccgctcagccgcagcttttgccccacttccagattatagggcgggcgtatcttgttgattctggccagatcgctgacttcgctgtcggtgatccaggcgatgtaatacagcgtatcgccccgtttgacggtgtaggacttgccggtgtagctgcccttcggcagtttgtcgtagtcgcggttgtaggtgtttttacccgaacatccggccaacagcagccccaatgtcagacacaccgcgatgcggcgccacctcgccagcttgcttcctgtgctcaaatcctgtccccaatcgtcttttcggttctgatacgcctcagccgcacagtgtaacatttgcgccgggtcagtcaaaaacccccagacggtctatgctaaacaggtaaggatgactgattaattacccaacgacgaaatggagtactgtcatgttgaacctcgaccgcaataatctgccactcctgagcgaagaactgctcaaaaagcaacgcaccaccctgctgatcatcgccttcctgctgctggcgggcggcatactgtgcctggtcaaccctttcgcctccggcgcggcgttgagcatcgtggtcggcgtcctgctgctgttgagcggcgccgggctgattatcgccatgatcgccaaccgggcgcagaatacctggccgatgatcggcggcattctgctgggcgtggcctacctgattatcggctatgtgttcatcaccagcccgctggcgggcattctggcgctggcggtctaccttgccgtgctgttcgcgctcggcggcatcgcgcgcctggcggccggctatatgcgccgcggattgccgggcaactggctgcagttcgtcattggtgtactcgatttgatcatcgcctggatgctgatcggctcaggcccggcggcgtcggtcacgctggtgacggcgatcgtcggcatcgaaatgctggtcagctcctttgcactgttccaggcggcgaatctgtttaaacgcgcctgacgctaccggcccgccatcgcgggcctcatcgcttttgttgcttccagacaaaacaaggcgataccccctcggcttgtccgtggttatcttcatcggtaagtgccaatataggcgcagacaagggagctgaaaccgatgacaacccattccaacccgttgaactcgcgggaagtctgcctgcaattacgccatttcaatcaggtaatcgggcaacaatgccgcaatatggcgcgccaaaataccacctgcccgtgctgcctgacggacatcgccaccggttgcgacgccggaatcaaactgtgcggccagcagttggccaaacccaacccgcaaaccccgttattccggcagattcgcaacttgctgctcgatctgcgcgcagaagcgataggggttcacagaattgacgtcctaaaccgcaccaataacgaaatatcctggctgttgcgtgagctgtatttcgagacgttctgatcccgcattttgtcggcgccgctaaagcgaaagccgaaagcgagatacgggcttttggcgacgcgatcgtgttcatcaatcattagcgtcaccggctccacgccatacagcctgaactccgcgagcagtcagcgggaggagcccgtttaaaagcggctctggcaaaggaaacgtccaccggcgcggggttaaccggcggcagcggttttcggcaacacgaagtcaacccgccgattcttggcccggcccgtcggcgtgtcgttggaagccaccggttcagcctccccttttccccgttcactcagacgagatttttctaccccatgtgcgatcagccaaacagccaccgcacgtgcgcgtcgcagcgacagatcctgattatatttatcgctgcccaccgcatcggtgtgtccctcgatcaccacgttccctaccggttcggcagcgataaattgcgccacctgtcgcagcgcaggctccgctttagcagcaatcgcatcgctgtcgaaggcaaacagcacatcgctgcgcatcgataacgttacggcatttttgctgtctctgacggaaatgtcggcggattgtttagccaaatccgctgccttactctgcagatcaaggacgccggcattcagccccgaaggcaaaccaaccaaatccagccgggtagccttgagatcgagtatcaccggtttccccacggacgccggctctccgctgtcagcccatgaacccaatgacaccagcccaaaggctaacatcccacccacacaggcggctttcctgaggccgttcatcgctcaacgatccgtaatggctatcggcccgagcggctcgacgttggcgatcgtcaggtacacctctttcacatcaggtggaggcgcggggaagctgccaaaccaggtggcgacatagggaatgcctgagcttgagctgaatgacacgttgggagaggccagtgggacattattgctatcggtaagcagcaggtattttttattacccaccagaatgtagaaggatttctcaagactgcttttatccagactgctatacaagccttgtccattaaggttgtctttcaaccctttgaaacgcactttgatggtcaggatttcaccgtggcgcacggcctcggtcacttgcgcttcggctacgccgctgctgacgatcccggtagccaacggggtcacggggggatcctccgcgaacgccatgccgggaaacattatcgaagcaaacaggcaggaaatgacgaattttctgacatgctgcatgatcggagtccttattcaggagggagttgaagattgttctttcaacaatcaggcaattccactgcggtcactcggtcccggaattatagtaaagcacctcatattcatgagagttatccctgaaagcgtaaccttggtcacgttatgcttgcgcatgaactctcacccgtagtgcttattttgctgaatgaccggcttcatacaggcattgccttctgctcatcctctctgctgttcaccccactttacgaccgccgtcacacctcgctaccgctaaattgcgttggttatagagtcgtctacaattcaatcgaattaccccctacaacatcagaaattattattattagaggtgattatgttacagaaacacgaaaacgtaataagtatgactgtactaagcccgcaagccacccaacagctgatgccatcgttctcctccttgccccacacgcaacacgccgacggcaaatatcgcctgcgccgttattcggtcgttaaatacctcaaccccaacgtcgccgaagtggggccgcgcaccttcatgcagtcggatcagatcaaccacttccagggcaatgtggttcgccgcttcgaacctatcgacagcgccgtgttgcagagcgccggcatggcagagatgtgcaacctgtttgcagaaagcaacgaacttccggaaggcgccgagatagagatccaccagatgcgcgtggtcgccatcgagaaagacacccaggtggcgccggaaggcattcaccaggacggtttcgaccatatcgcaatgatcgccattcatcggcacaacatcgtcggcggtgaaatcatgctgtatgacgacagccaccacgaccctttctttaaaaaagcgctggcggacggtgaagccgtgctgctggcggacagcaaactgtggcacaacgccacgccgatcaacgccgtgagcccggaagaagaaggtcatttggatctctttgtcctcaccgcgcggggggagaaagcatgacctttacccccgagctcgcccgcgcccagttcagcgcgctgtcacagcagatcgacggcaaaccggccatctttttcgacggccccggcggtgcgcaggtttcacggggcgtgctggaaaaaatgaccgactacctgggaaggtacaacgccaacctgggcggccactatttctcgagccgggtcaccggcgaggtgatgggccaggcgcgggaatcggtgcgcgccttgttaaatgcgccgtcgcccgacaacatcgtcttcggcatgaacatgaccacgctgactttccatctcagccgcatcatcagccgcgactggcaggccggcgatgaagtcatcgtcaccgcactggatcactacgccaacgtctccagttggcagcaggctgccgctgacaaaggagccgcggtgcatcagataccgctggagagcgccgactgcgcattggaagccgcgaaagtgtgcgagcgcatcaacgccaacacccgtctggtggcggtcagctacgcctccaacgtcaccggcagcatcgtcgatatcaaaaccatcgtcgaagccgcgcatcgggtcggcgcgcaggtgtatgtcgacgccgtgcactatgcgccgcacaacctgattgacgtgcaggcgctgggctgtgatttcctggtgtgctccgcctacaagttctttggcccgcacgtcggcatggcctacatcgcgccgcagtggttgcagcgcctgcgcccttacaaggtcgagccggccaccgacgtcggccccggccgtttcgagaccggcacgcaaagcttcgaagcgctggccggcgtcgcggccgctatcgagtatctggcgcagtggggcacgcccggtgcgccgttgaggcagcgtttgcaggagagcttcgccgcctaccaccggcatgaagaggcgttgtgcagccacttcctgcagcggctgcaacaactcgacggcgtgcggctttatggcaccccccgggcggacagcgcgcgccgcacgccgaccttcgccctgaccttcagcggccacacgcctgacgcgatcgcccgccgcctggggcagcacaacatctgcgccggcagcgggcatttctatgcgttgggcttggtgcaacagctggggttgcaggacggcggcgtgctgcgcatcggcatgatgcactacaacactcggggcgagatcgatacgctgttcaacgtgatcgccgaagatattctcagttaatccggccatatcggcccgttcatcttattgagcgggccgaatcaagtatcaaactgcccgtcttttcttccaccgcgtccacggcgcacagatgcgtgcctttctttccccgcgttacgaaatgcggagataacgaacatataatgccggagaccggaatcggcgcatcgtgcggttgtcaccggatacggcggaggcagcacattgcgtgcattctcttttgactcggcagtgggcataatgacaaacacggtctggatcagatgagtatgaatggtgaagtcgcagcgcattacgttaaatgacattgctgtactggctggtgtcaccaaaatgacggtcagccgctatctgcgcacgccggacagggttaaaccggaaaccgctgcgcgcatcgccgccgtgatcgaggaagtcggctatcaggccgatcctgacaatcccgccctctattccaatagccctcccctcatcggcgttctggttccttcttttaacaatctgatatttgctgatgtcctcgccggcattgaatccgtgacgtctgtacagggttatcagacgctggtcgtcaattatgactacaacagcaaacgcgaagaggagcaaattgccgcgatcctggcttttaagatcaaagggctgctgctgaccgagtcggttcatagtctgcgggcggaaaaattcctgaagacggcaaaaatacccgttgctgaaatcatggggctgtcaggcaatgcagatcgaattaacgtgggttttgataatgtgaaagccggctacgatatgaccaccatgttgctggccagcggtaaaaaacgcattatctattttggttcaatgtctgatatccgcgatgaacagcgttacacgggatattgtcaggcaatggctaaccatgatttacctaccggtcgtatttcccccaataagatctcttccatttcaattgggacaggcatgatgacgcttgcgagccaaatgtatccggatatggatggtattctctgtaccaacgacgatctggccgttggggtgttacaggaatgcctggcaaacggtatcagcgttccagcgcaaattgccattgccggatttcacggtcttgagatcgggcagatcatcaccccccggttagccagcgtactgacgccacggtatgagatggggaaagtggcgacagaaatcataataaaaaaaattaaagggctgccgaccattgaacgtgtcgatctccacttccgcctgtcaatgggggagacaatatagctttccccgccagtcacttcagcactggccataattgcccgcttcgccagaaaaacatcactcgctatcccgaccagaaattcggccagatggcgccacccacctgaccgaacgcccccttaacgtgccttgcggcgccggagccagaataggaccagcagaataatgacgaccgccgcgacggccatgccaggcagaatcatcggctgtgcgcgcgccaacagcggtttcgggcccccggcgcgcacctcactcacgtcctcctcagtcacgctcagcgtgctgttgccgtatttctgcagcacgaagttagcgatatcggcaacctgcttatccgtcagctctccgacataggaaccggcgccaaagctcggcatcagtacgtgcttgccgtcaacccggcgatcaaccccctgcaaaatggcggcaatcaggtttgacggattgctcgcggccgtggtggagttgttgaatagcgaagggtaggcctggttcaaactgccgctgccgtccggctgatggcaactggcgcagtagccgctgtagagcgcctcgccgctattgagcgtgtggttggcgttgggcgaattcatgccgcggagatggggctcaacgttgtagtgcgcctggctaaggccattgccctggcgcccctcgccctgtgacggcacggtcttcaggtaagttgcaatcgcccgcagctgccggtcggtcaggtattggaagctgtgctcaacggcttcagccattggccccgcagcttgtgcgcgcccttccgcccgaccggttttcaggtagtccactaactcctgctcgctccagtcgccgatcccttcctggcgatcggcggtgatattcggcgcgtaccaagcccccaacgatgcccccatcaggaagcgcgaattgtcttccgccatcagcacattacgcggcgtatgacaggttccgcagtgagccgggccctgcaccagcgcagccccctcgttccacgcctcacctttcgtcacatccggggtgaaacgccgattgtccaaataaagcatgttccacaccgccatggagaggcggatgttgaacggaaacggcagatcggtttggcgcttggccggctcatcgaccggggcaacgccatgcatgaaataggtatacaacgcgtggatctcgtcatcactcagacgggtataggcggtgtaaggcattgccggatagagatacgtcccatcttgccggatcccagagcgcagaacctcggcaaacgccgcttcagaatagccgccgatgccgtattttaccgatggggtgatattggtggcgtagatagtgcccatgggagaagcaatgccgtaccccccggcaaaaggcttgccctgctgctgggtattcgtatggcaggccatgcagtccgaggcgatagccagcgcttgccctctagcgatcagatcgccgtcctgggcatgcgccgcgaagccgcttcccagcagcagcgtcgctgccagcgagtgggtgattttattcatttgctctccagggcgcgcagtacgtcattggccgccttgagtccaagcgccgccatcgtcaacgtggtgttgacaacgctggctgaaaccatggcgcctccacccgggatccaaaggttgtcatgatcgtgggcgcggcaattgccgttcaccaccgagttcgtgggatcgctgcccatgatcgtgccgcccataatgtggttgttggcattcagcttgtcgttaatcacaaactcttgcgcatcaaacaagtcgccaatctgccgtagctggattttgaccacttccagccctttgcgcacataatcgccgacgtcgtagtggatgtccgggcaggccaggccatgcttgtctttgcgggtagggctcagggtcagacggttgttcgggtccggcagcggttccaggctgatggagagatccaccgagcggctggcgcgatcgcgcacttcatcctgcagcgccttgccgaccttgcccgttttcaggacttcaagggcggaggggatcacccggttgatattgttgatgatgatcttgttggcggagtggtcgctgcggaacgcgccgtcacgataccccaccatgcagctgctctgcgccgggccgcggccaacccacagggcctctcgcgccaggaaggagcagtgcaggccagagtgatccatcatgttgcgccccacctgatccgagctgttcgcgatgccgttcgggttcttttcgttggccgccagcagcagtaagcgcgggttctcaatcccattgcaggccagaacgaacgttttaccgatcgcccgatgggagttatgcgccgtgtcgtaccagtgaacggcggtgacgcggttattgtcgtcggtgtcaattttgtacaccaccgcctcggggatcaccttcgcccccttgtgttcggcccgttcaacgtggtgaatgccgttgtacatcgccccgatagggcaaatcggctggcaattgttattgccgcagcaggtgggccgtccgttccagggccgggtgctgcggccttgcggaatgggcaccgatttaaaaccgtgaggattaacaatctcagcaatgcgtctgtcgccgtaggcccagggcaccatgtccatcgggtaaggcccgctgcgttccgcaggggactgccactccggattattcgggccggcaacgcctatttcctcttcggctttcgcgtaccacggttcgatatcttcgtaggaaataggccagtctctccccacgccatagagggatttcatgcgaaaatcattgggatggttgcgccagcaagaagcggcccagtgccaggtggttccccccaccacacgcaaatagccctgtttaaagcctgagccattggggccggtcagtttgatatagtcgttctccgggaaatagagcggcgcggtggcgtactccgattgcgggtaaagcccctgaaaatccgaccccgcacgattgtgcagtggcatattgcgccagttttccacagcctgtgcgcgctcaatgcgcgggcctgcctcaagcaccagcaccgagtagccctggctcaccaaagcatccgccatcagaccgcccacaataccggaaccgacaatgacgacatcggcctctgcatcgccggaagcattaattattgggcttttcacacgcggtcctcatattttttatcggctacggcaggcaaatctgttgcgggaatggaaggttggcgggtaacgcccggcggcaagccggtccaccacagcgggccaaaattgcaccaggtcggcacaatcagggcatcctgaaccgtgcgatacatcagcgcctctttataactaatcaactgaccctgctcagcgtttgaaggatctacggttccggtataccacgcggtcacgatcgcctggataagctccctctgcccctgttcaatcgcatgtcggttcaaggtttccgcatcggtggcttgctggctcaggatgaacagggcgttgagttgcgagttcaactgcggaaaatgttcgcgcagtgcggaaaaatagcgggcggagagtgtgacgtccaaatcgtcaaactcggtaatttttctcgaaatttgcaaaaattgcgcgtattcaacgggcgaggcggcaatttgcgcccgttcggcataggttatatttgaataaggcaacaggctggcggcgacgatgacgcccaccattttccccagcgcctccctgcgggtaagcacgatttgcaacgacattattagctccgaaataatttatttttatatagtttttttaatatctatcagaacgcaggcaaaccaaaataaaaaattgtgctaatggggaggaaccgcattaaaagatcaaggcgttatgagattggctacatcgactacagaggtaaactccggccttaatgatgtaatctgaacctgaagcaaatatccctgtaaataatacggcgtaatctctgccgtaaatttattcaacccaactcaatctttaaaagttaggggctatggctttgacgggaaaggcgcattcttcggaagcgctgcagacggcggatgagcaaggctttccgccgggcagcctgaagtagcgataccagccgccgctgaacgtcttgctacgtcagcagggcgccgtcgattttcgccacaattttacgcagaactgccggcgttgtgcaggtactcatcgggcgatgcagttcccccggaaagataacggccagttcaccgggttgcaggtggatgagagtctcaccggggatcgccgggctaaacccaaggtcgtgcgcctcgttaaatggctcactcaacggcaaaggcagccccagaaccccggcgccaatcacttctcgcccttccaggacaagatggatatccagatactggcgatgaaactccggcttctggtcggccaacagtttggtttccccttcaacgacgttaaagaacatctgtttaccctgcacctgatagtggccgacaggtaaattgtacggctcactttcaataatgctggccagcatttttcgaatggctgccggatagaatttattatttacggcagtggttaaggcatcaataatcataatattttctctggtagatatcgattcggtatttcaccgacaagaacaatggctgggtagttttatggcaacaggcaatctcggcgtaattacggtagaatcgctattcgatcgttctacgggcgccactatgaataagcaacaaagcaaaccgctttcttgttaatatttacagcctatcaccactgtgagtaaactccacctgaaaggctattcggcatggtgaaataagtcatgacctatctcacggtttttagccgcttaaaactgtgacaaaagtcacttaattaagtgttacgaaacgacgttacttatcctgtgatccacggcagaaaatcactggatattcaccgctctcaccaaaatcgatcgatttagccttctccccctacgggcataatgagttattttccccgatagtcactgacagaaaccacgaaattgcacacgagatcacgccagcagtaacatgcttttttaacactctttggcgtgatgcagatcgcaaaaataagcggtaaaaaaacgtctgatacagggtatcccctatttttcagacaggatcgcaacgatgcacactgacactcaacctaccattttgcttatcgcgccggtgatggatgctttgcaagccgcgttggacgcccgctaccgggtattccgtctctatgaacaatcagatattccagccttcctggttcgccatggcgcagacgttcaggcggtggtcacccgtggtgatgtgggggtaacccgagagacgctggagcagttgccgcaggtgggcatgattgctgtctttggcgtgggaaccgacgctatcgatctcaactacacccgggaacgccatatcagcgtcgggatcaccgccggcgtgctgaccgatgatgtggcagatctggctctggggctaatgctgtccgccagccgccgcctctgccagggggaccgatttgtacgcgaaggccgctgggaaacgacgccgccaccgctggcgaccaaagtgagcggtaaacgcatcggtattttcggcatggggaatattggccaagccatcgcccgccgggcgaaaggcttcgatatgaccatcctgtatactgaccgccagcgcaaagacggcctggattaccagtggtgcgccgatctgcatacgctcgcagcgcagagtgatttcctggtgatcgcggcatccggcagtgcggaaaaccgcgggattattgatgccagcgtatttaacgccatgcccgaacgcgcctggcttatcaatattgcccgcggcagcctggtcgatgaggcggcgctgataaaggcgttacaaaatcatgttatcgccggggccgctctggacgtctttgaaaacgaaccccatgtcccgacagcgttctttgctctcgagaatgttctgcttcaaccccatgtggccagcgctaccgtagaaactcgtcagggaatgagccaatccgttttggataatctggcaggttatttttcacatcaggatattcctgggttaattcaataaaaatgatcgtttgagttacgaataatcatttttatccgccaactcaatatcctctgtgaatggcggatatcatcgagacgctattatgaccgataaaataccaggaactcgctggctgcgggttatcgcgccgatccttatcacctgtattatttcatttatggatcgcgttaatatcagctttgctctgccgggtggcatggaacaggatttaggtattaccagccagatggctggcgtggccagcggtatcttttttattggttatttatttctgcaaatccctggcggacgacttgcggtttacggtagcggaaaacgttttatagcctggtcgctcgtggcctgggcgattgtctctatcgccaccggattcgtcacccatgaatatcaactgctcgtgctgcgttttattctcgggatctccgaagggggaatgttgcccgtcgtgctgaccatggtaagcaattggttcccggaaaaagaactggggcgcgccaatgcctttgtcatgatgtttgccccactaggggggatgctgaccgccccggtttccggcgcgattattgccactctcgactggcgctggctgttcattatcgaaggcttgttgtcggtcgtggtgttgactatttggtggctggtaatcagtgaccgtccggaagaggcgcgttggctaccggcgaaggaacgcgactatttattgaccgaactggcccgggagcgcaaagcgcgggaagggagggtgccggcagcgaaggcgccgttaaaagcggtgtttcgcaacaagggattgatgcgcctggtcgtgctgaatttcttttaccagaccggagactatgggtatacgttgtggctgcccaccatcttgaaaaacctgaccggtggcagcatggccaatgttggggtattggcgatcctgccgtttgttgccactctggcggggatttatgtgatttcgatgttcagcgatcgcagcggtaaacgccgtttgtgggtcaggatctccctgtactgttttgcggcggcgctgatagcctcggtgatcctgcatgagcacgtggtggccgcctatatcgcgctggtggtgtgcggcttcttccttaaagcggcgaccagccccttctggtcaattcccggacgcattgcggcggcggaagtggcgggcagcgcacgcggggtgatcaacgggctgggcaacctcggtgggttctgcggcccctatctggtaggcgtcatgatttatctgtacggacagaacgtcgcggtttgcgcgctggcggcatcgctgttgctggcaggaagtatcaccttcctgctgccgaaagaatgcgaccgctcctgcgaagaaacggacaaccgcctgccatccggggctaaacagaagtggagttaaacggcaatggcgcgctgtgggcagcaacggcggctcacacccgcatcaggattgggcggcgcgttgtattatcgcggttaaatgccaggccaatggcttgagcgactcacaagccaacccgcaccaaacggtgatgcaatcgttgagaatcagcttttctaaaaacggttataactcaatggggtaatgcatagggagattggagcgggtgaagggaatcgaaccctcgtatgcagcttgggaagctgccgttctaccattgaactacacccgcatcggtgtgcgacaggcattataaccggttatcggcgacgggcaagcggagatggcgcgtaactgtcgatgttttaagcggttaagtcccgtagacgaaaaaaaaccggcgcagttgcctgcaccggttgttgcacgctaaacgggattatttctgtgggcgcatcgccgggaacagaatcacgtcgcggatggtgtggctgttggtgaacagcatcaccatgcggtcgatgccgatgcccagaccggcggtcggcggcaggccgtgctccagcgcggtgacgtagtcttcgtcgtagaacatcgcttcgtcgtcgccggcgtctttggcgttcacctggtcggcgaagcgttgcgcctggtcttcggcgtcgttcagctcggagaagccgttgccgatttcacggccgccgatgaagaactcgaagcggtcggtgatttccgggttcacgtcgttgcggcgcgccagcggcgacacttcagccgggtactcggtgatgaaggtcggctgaatcagatggctttccgccacttcttcgaagatctcggtcacgacgcggcccaggccccagctcttctcaaccttgatgccgatggattcagcgatggccaccgctttgcccatgtcggccaggtcagccagatcggtttccggacggtatttcttgatcgcctcggtcatggtcaacttctcgaacggcttgccgaagtcgaacacttcgtcgccgtactgcacctgagaggtgcccagcactttctcggtcagggtgcggaacagggtctcggtcagctcgatcagatctttgtaatccgcgtaagccatgtagagttccatcatggtgaactctgggttatgacgcggagaaacgccttcgttgcggaagttgcggttgatttcgaacacgcgctcgaagccgccgaccaccagacgcttcagatacagttccggcgcgatgcgcaggtacatgtcgatatccagcgcattgtggtgggtgatgaacggacgcgcggacgcgccgcccgggatcacctgcatcatcggggtttcgacttccatgaagccgcgttccaccatgaagttacggatagcggacatcacctgcgaacgcaccttgaaggtgttgcgcgattcttcgttggcgatcagatccaggtaacgctggcggtaacgggtttcctgatccgccaggccgtggaatttgtccggcagcgggcgcagcgctttggtcagcagacgcagttcggtgcagtggatcgacagttcgccggtcttggttttgaacagcttgccgcgcgcgccgaggatatcgcccaggtcccacttcttgaactgctcgttgtacacgccttcagccagatcgtcgcgcgcgacgtacagctgaatgcggccgcccacgtcctgcagcgtaacgaaggatgccttgcccataatgcggcgggtcatcatgcggccggcgacggtcacttctacgcccagcgcttccagctcttcgttgtctttatcgccgtacgcggcgtgcagtttgtcggaggtggagtcgcgacggaagtcgttcgggaacgcaatgccgttctcacgcaggccggccagtttctcgcggcgggactgcagttcgttattgagatccagcgcctgatcggcgccctgtacttgttgttcagacatttctattcctcataacccggctttcaaacttgcctcaatgaatttatccaggtcgccatccagtacggcctgcgtgttacgcgtttcgacgttggtgcgcaaatccttgatgcgggagtcatccagcacgtaagaacggatttggctgccccagccgatgtcggacttgttgtcttccatcgtctgcttatcagcatttttcttttgcatctcaaactcgtacagcttggctcgcagctgtttaaacgcttgatccttgttcttatgctgagaacgatcgttctggcactgcaccacgatgttggttggcaggtgagtaatacgtacggcggattcggttttgttgacgtgctgaccgcccgcaccggaggcgcggtacacgtcgatacgcagatccgccgggttgatttcgatatcgatatcgtcgtcgacttccgggtagatgaacaccgagctgaacgaggtgtggcgacggccgccggagtcgaacgggctcttgcgcaccaggcgatgaacgccggtttcagtgcgcaaccagccgaacgcgtagtcgccgatgatcttgatggtggccgatttcaggcccgcgacgtcgccgtcggactcttcgatcacttcggtcttgaagcccttggcttcggcccagcgcaggtacatgcgcagcagcatgctggcccagtcctgcgcttcggtgccgccggagccggcctggatatccaggtagcagtcggcgctgtcgtattcgccggagaacatgcggcggaattccaactgatccagcttgctcatcagttgatccagttcggcgaccgcttcgttgaaggtctcttcatcgtcggcttccaccgccagttccagcagcccgccgacgtcttcgccgccctgctccagctgatcgatggtttcaacgatggcttccagcgcggcgcgctctttgccgagcgcctgcgcgcgctccggctcgttccagacgtccggctgttccagctcagcgttgacttcttctaggcgttccttcttggcatcatagtcaaagataccccctaagaaccgcagtccgctcggacaggtcctgaattcggttttttaccgggttaatttcaaacatggtttcgttcttttacgttgatgtcgtcgatggcggaatgccattggaaccgctaattctaacggatccgggcggcagtttatagcgagttggtcagtttttgtggcgatcgggaaggatgccggggattggagagcccaatccccgaattgtgttcaatttcacttcagcgcggccaaagatgctggatcagcagttgcacgttgcggttgccgcgaaactcgttgacgtcgagcttgtaggccagttccacttcgcgcacgctgctgtccggccacagcgtggtgtccacgttgaacgcgatgccgtcgagcagcgggccgccgccgagcggttccaccatcagcttcaggtgtttctcgcccaccagccgctgctgcagaatgcggaacttgccgtcgaaggtcggttccgggaacgcctggccccacgggccgccctcgcgcagcagctccgccgtggtcagcgacagctcctgcatcgccagttcgccgtcggaccagataaccccttccagcatcgccggatcgagccattcccccaccagctcgccgaaacgctggcggaactcgtcgaatttggcctcttccagcgacagcccggccgccatcgcgtggccgccgaacttcatcatcagcccggggttcagcatatccagccgctccagcgcgtcgcgcatgtgcaagccgggcaccgaacggccggagcccttcaggatgccgtcgcccgccggcgcgaacgcgatcaccgggcggtggaaacgctctttgatgcgcgaagcgaggatgcccaccacgccctggtgccattccgggtgatacatcgccaacccataaggcagctcggtgctggtgcgctccagctgatcgcacagctgcaaggcctccacctgcatgccctgctcgatctcgcggcgcgtctggttcagcgcatcgagatcgttggccagcatgcgcgcctgcgcgatgtcgtcgctcagcaacagcgccacgccgatcgacatgtcgtccagcctgccggcggcgttgagccgcgggccgagggcgaaaccgagatcgttggccgccagctggcgggcgtcgcggttggccacctcaagcagcgcgcggatgcccgggcggcatttgccggcgcggatgcggtttaacccctgatacaccagaatgcggttgttggcgtccagcggcaccacgtcggccacggtgccgagtgccaccaagtccagcagttccgccagattgggcatcgccagcgcgcgctgctcgaaccagccgctgtcccgcaggcgggcgcgcagcgccagcatcaggtagaacgccacgcctacccccgccagcgatttggacgggaaggcacagccgcgcaggttggggttaacgatcgcttcagccgccggcagggtctcgcccggcaggtggtgatcggtcaccagcacctgcatgcctttggcgtgcgccacgtcgacgccggcgtgggaggagatgccgttatcgacggtgacaatgagttctgcgccgcgcgccgccgcctgctccaccacttcagggctcaggccgtagccgtcttcgaagcggtttggcaccagataatcgacggctgcgccgcccatgctgcgcagcgccaacaccgtcagcgcggtgctggtggcgccatcggcgtcgaaatcgcccaccaccatgatgcggcggccgtcggccagcgcctgttgcagcaggctgacggcgtcgtcgataccgtccaactgttgccagggcagcatgcccttgacgctgcgttccaactcttgctcagcctgcacgccgcgcagggcgtaaagccggcgcagcagcggcggcaaactggcgggcagatgcgtgtcgtccgccgccgggcggcggcgtagttgcgttttgatactcaccggcgattaaccaccggctttggtggcggcctggtgcgcatccagcatggcggccatctctttcggcccctgatagcccgggatcatcatgccgttttccaggatgatggccggcgtgccctgaatgccgaactgtacgcccagctcgtaatgcttgctgatgtcggttttacaggtcgccggagaaacggcgtcgcccttcatggcggcgtcgaacgccttggccttgtcggcggtgcaccagatcgactgcatgtctttttcagcctgggatgccagcccctggcgcgggaatgccaggtaacgcacggtaatacccagatcgttgtactctttcatctgctgatgcagcttgtgacagtaaccgcaggtgatgtcggtgaacacggtgatcacgtgtttctctttcggcgccttgtacacgatcatctgatctttcagcgcgtccatcttgctgctcagcagttggttggtcacgttgaccggctctttgccgctgacgtcgaacagcgggccctgcaggatgtgcttgccgtcttcggaggcgtacagcacgccgctgtcggtcagcacggttttcaggccgttgaccggtgaaggctgcacgtccgcctgctggatgcccaggctggcgagcgcttttttgatcgccgcgtcatcggcatgggcggcgccggccaccgaggccaccagcagtgaaagcagcattaaaccttttttcattattccaatcctttcgaacccgccgctcaggcgcgcgggtgatgctgttgatgtagctgtttcagtcgttcggtcgctacatgagtataaatttgcgtggtcgagagatcgctgtgccctaacaacatctgtacgacacggagatcggccccatggttcagcaaatgggtagcgaacgcgtgccgcaacacgtgcggcgacagacgctcgctgtcgatgcccgcaaggatggcatagtgtttgatgcgatgccagaacgtctgtcgggtcatttgctggcagcgggtgctggggaacagcacatccagcgtctggccgttgaccagccatgggcggccgtgctccagatagttttcgatccagtagaccgcctcttcgcccagcggcaccagccgctccttgttgcccttgccgatcacccgcaccacgccctgacgcaggctgacgtcgctgatgttcagccccaccagctcggaaacccgcagcccggtggcgtacaacacttcgagcatcgccttgtcgcgcagctccagcggctgatcgacgcagggcgcctgcagcaacgcatcgacctgcgcctcgctcagatccttcggcaagcgctgcggcagtttgggagacgccagctgcgcggtgggatcgtcggcgcgcagcttttcgcggtacagatattgaaacaggcgcctcatggcgctcaacaaacgcgcggagctggtggctttgtaaccgccatccacccgctcggcgagaaacgcctgcagatccagcgcctgcgcctgcagcaaatcggtcttctgctggccaagccaggcgcccagggcctgcaaatccagccgataggaggccagcgtattttccgccagattgcgctcaagccacagcgcatccaggaattgttcaatcagcgcattgtcttgctgttgcacgcggtcctctctttgttgcatttccacccgcgccattatgccttaagccggcgcaaatcaggtatactcgctgcaattctctaaacagcaacgtaacggtttacacatgaagattggtctgttttacggctccagcacctgctacaccgaaatggcggcagaaaaaatccgtgagattctgggtgaagacctggtcgacctgcacaacctgaaagacgtctcacccaagctgatggaggactattccattctgatcctcggcatcccgacctgggatttcggcgaactgcaggaagactgggaagcgatctggccgcagctggcggcgctggatctgaaaggcaaaatcgtcgccatgtacggcatgggcgatcagctcggttacggcgagtggttcctcgacgcgctgggcatgctgcacgatcacatcgcgccgttgggcgtacagttcatcggcttctggcccactgagggcttcgagttcaccagccccaaaccgctgagcgccgacggcaaacacttcgtcggcctggcgctcgatgaggtcaaccaatacgatctgagcgaagagcgcctgcagcaatggtgcgaacagatcctgttggaaatggagccgctgctgtagccgctatcgggcgtttctccccaaacgccgagcgccggcggcatgattcgcgccggcgccccctatcagccttgttcgccgtcacccgccggcggatacagcaacagctgccgcaggtggcgccattcctctttgctcatgcagtcggaagccagccacagccggcggcgctttttgccttccatcggctgcagcgtcaacagcatgccgtaacccggcatccacggttttttcgccagccgccactcgcggccgtgccagctgaaacgccgatccgccagcagccgcagctcgccctgcaccgcggcgatgcgcttctggctgcgaatgcactgaaacaccaccagcgtcagcagcaccagccagagcgggccaaagccttccggccagggcgaaatcaggatcagcaggatcagaacgccgtgggtcaacagtgaaaacagctgggtgcgccaggaaatgcggatatcacatcgccactgggccacggtctttatttcgcgtttggatcagggtcaccattctctgcagctcgccgtcctgcggcgcgccatgattcatcagccagttgaacaaatcgggatcgtcgcactccagcaggcggataaacagcgccttgtccgcatcattcaggctgtcgtattcgtattcgaagaacggcatgatggagatgtccagctcgcgcatgccacggcggcaagcccagtgaatacgtgctttgttgttaatatccatgttgttatgactcacctcttttcagcgcggcagcgccagcgcagggttcaaatgacacactgtatggcaacgccgtcgcaatataattccatcaaccggggatctgtctgcaagggtgccctggccgcaagcctatagagtaacaatttgacatacacgccgggaaggcgctttgtggcggaaaacgcaataaagcgcaaaatgccaaaaaaagcgcaccccggcgccgcggcgcgaataacagtttgcaaagcccgtcgcctcttttaccatgggtccaatacccttcaggtaagctaaacgttgagcaggaacttactatggcgcataacattccattcccaccccgtcagccctccgcttccacccatctgcccctgacgctgatctcgctggaagattgggcgctggtgacgctgaacgggccggacacggtgaaatatctccagggccaggtgacggcggacatcgacgcgctggcggccgatcaacacgtgctgtgcgcccactgcgacgccaagggcaaaatgtggagcaacctgcgtctgttccaccgtggcgaaggcttcgcctatctggagcgccgcagcgtgctggacagccaactggcggaaatcaaaaaatacgcggtgttctccaaagtcaccatcgccgccgataatgacgcggtattgctgggtgtcgccggtttccaggcgcgcgccgcgctggcgggcctgttcgccacgctgccaagcgctgagcacccggtggtgcaggacggcgagaccacgattctgcacttcaatgcgccggcggagcgttttctgctggtgacccgccccgccgtggccgaacagctgatcggcaaactgcatgaccaggcggaacggaatgacagcaaccagtggctggcgctggagatcgaagccggttatccggttatcgacgccgccaacagcgcgcagctgatcccgcaggccaccaacctccaggcgctggaaggcatcagtttcagcaagggctgctataccggtcaggagatggtggcgcgcgccaagttccgcggcgccaacaaacgtgcgctctactggctggaaggtaaagcggctcgcgccccgcaggcggcggaagatctggagctgcagctaggggaaaactggcgtcgcaccggcaccgtactggcgtcgagccagttagccgacggtacgctgtgggtgcaggtggtgatgaacaacgatctggatgccgacagcaagctgcgggtgcgcgacgatgccgccagccagctggcgatcaaaccgttgccctactcgctggccgaagagaaataatccgtcggccgcaggccccctgcctgcggccatcttcgttactcgtccaactccccgtcgcgctgcaccagatagatcagcaccaagatgatggtgacgaagaagcgaaacgcgctcggcacgccgttccattgctgcgacatccacatgccgaaccactcccctccaatcgacataaaaccgacctgccaggtaaggaagcccagcgtcagccccgctaccgcccattttttgcggccgttgaaggcgttggcgggcagtttcaggccgcacagcaggcgcaggccaccaatccagcacagcagcgcggtcagactctccaacgcaatgatgaaaatataaccggcgtgatgcagccacggcgtctgtatcgagcggtagccgatggtggcgtcggggaaaagggtatccatcataaagacgtggcgcacgaaggcgaaattggagccgtagtcggtgaggttgccgaaggcgaccagcgaagcgaacaaggcgatagcgcagatcagcagcgctttggataagcgaacgatcatcttggtgagtcctgaacagaggttaaagaaacggtatgcgggctcagaaatgaaggaacgggcttgctggatacccgaaagaagcaagcgcctcttttttaaaacaaaagaggcgctagttcaatacgcattcagacgtagcggcaacgcttagacgtacaggtagatcgccatgaagtggcaggcgctgccgccgagcacgaagccgtgccagatggcgtggccaaagcgaatgcgcttggaggcatagaaaatcacgcccagggtgtagaccaccccgccgatcgccagcagcgtgacgccgccggcctccagccgcgtaaccagctgataaatcacgatcagcgacagccagcccatcgtcaggtaggtcaccagcgacagggcttcaaaacggtgggcgaaggccagcttgaacagcacgccgagcagcgccaacccccagattaccgccatcaggcccttcgccagcggcgaatccagccctaccagcaagaacggcgtgtaagtgccggcaatcaggagataaatggcgcagtggtcaaattttttcagccaatgcttggccttttgatgcgggatcgcatggtacagcgtagaagcgagaaacagcaggatcatactgccgccatacaggctgtaactggtgatggccgtcgcatcggcgccggtattcaccgcctgcaccagcagcaataccaggccgacgataccgaacaccagcccaatgccgtggctgatgctgttggcgatctcttccgcccacggataagccgcggcgacaatcttattgttcccggctttcactacgtccgttttccccataacgcgcaacccctcaaaatgccctgctttgtgcgaaattaacgcaaagcagcttaactgagaataattccagtgtacacgtgtacgctaaaataaaaatgtgaacgcgtgtaaccatcgaaatcccccgcccgctggtctacaatcgtcaggcttcaacccacccaccttgaggtttacaccatgtcatccgctgtacccgcgttagatttcggttcaatgacccaggccatccagttcctgatggaaatcgataagttgaaaggcgtgcaacgccgcaccaaggtactgggcacccagcgccaggaaaactccgccgaacacagctggcatttcgccatcgccgccatgagcctggcgccctacgccggtgatgacgtagacattcagcgcgtgatccagatggcgctgctgcatgacatcgtggaaatcgacgccggcgacgtgctggtctacgatctggcggcccgcgcggcgatccacgatcaggaagtggcggcggcgcgccgtctgttcggcatgttgccggaggctcagcgcgagtatttcaccgctttatggcaggaatatgaagacggcgaaagcgccgatgcgcgctttgccttgctgctggatcgcaccatgccgatgctgatgaatctgcacaatgaaggccagagctgggtagaaaacggcatcagcctggagcaggtgctggcgcgcaatgcgtcgatcgccgacgtgcatcccgagctgtggcgccatatggagcaacatctgcgggacgcgcagcgcaaaggctggttgaagtaagggagccgggctgccgcctctgcgccgcagcccgtcaacgtcaagcgaacgcctgctggcgttccaacgcctcctcataactcggcatcgatcccgccgccccggcgcgttccacgcagaccgccgcgtaggcggcggcgaagcgcgccgcatcggctaacggcacctgattcgccagctgcgccgccagagcgccgttaaacgcatcccccgcgccggtggtgtctttcggctgcgccggaaacgccgggatcagctcactgttttccccgtccgagaacaacgctccctgcgtgcccaaggtcacgatcagcaaacgaatgcccttggcgtgcagcacctgcgccgcctgacgcgccgaagccacatcccgcaccggcacgccggtcagcaatgtgcattcggtggcgttgggcgtcagcagatcgacctgcgccagcaggctgtccggcaccggctgaaacggcgccgggttgagaatgatgaacgtccgcgcctcgcgggcgatggcaatcacttgttcgatcgccggcaggttgttctccaactgggtcaacagaatatccgccgcggcgatcgccgggcggcactggcgcacctcgtcctcgctgaccgtcaggttggcgccgggatcgacggcgatcatgttctccgcatcctcgccggcaacgtagataagcgcattgccggtcgggcaatcgccggtcgagaacagcgtcaccgcatcgaagccggccgcggcgagatgacgccgggcgaaggtgccgaagtcgtcgcgccccaccttgccgatataatgcacccgcgccccggcgcgcagcgcggcggtggcctggttggcgcccttgccgcccgcccccatcatactgttacgggcgatcagcgattcgccgggctgcggaaaccgcgccataccggcgacgatatccaggttgaacgaaccgaacacgcagactttgcctttcattgctggtactccctgctcaattggaggtggcgccgggcggccagacaggcgcctttgctgccggtttcatcggtcaggcggctgatggagatcgccaatccctgtgccggctgcggcccgcgcagatgacggcggatctcttgctccagccgcgccaacggaaaaccgcgcatggcgatcacgccgccgcccaggatcagccgttgggggtcgatcacgttcatttcgatggcgatggtctgcgccaatcgttcaacgaaacgccgcaaatccggatggtcgccatggcgttcgaacagccggtcgaacggcgtttgcgccgcgttggcgcgcgcccagccggtcagccaatggccggaggtcaaactctcgacgcagccccgtttgccgcacgggcactcgcccagatggcccggccagggaatgtgccccaactcgccggcggcgccatgcgccccgtggtaaaaatcgccgttcagccacaggctgttgcccatgccggtgcccagatacagtcctaccgccacctgcggcagcgccggcagctgctgcaaatcccaccacagcagatggttgacgtccttgtccattcgcaccggcagcgccagcaaatcggccaacagcgccgccaccggctgggcatccagcgccggaatgaacggcagcgacagcacccgcgagcgatcgcggctgaggatccccggcagccccagcatcacctgcgccacctgacgatcctcgcaatgccgggcgataagatcgcccaacgtcgccagcggatcggcccgctgcgcccaatcggcggtcgctatcttgcggtaaccgctaaactcgccttcatcatccatcaacagcaggcgggtattggtgccgccgacgtcaacgccaagaaaataccgcatcatatcccccgcctcaggccgcctgccgcatctgatccagcatcttttcccacgccgtttccagatccggatcgaggttgaacagcccggaactgccgacgatcaacacttccgcgccggcgcccatcagatcgcggtaggtacgctggttacaggatccatctatttcgatcagatagttcagatcctgttggcgtttcagatcgcgcaactggcggatcttgtccagcatttcgggaatgaacggctgcccggcatagcccggatcgacggtcatgacggtgaccttgtccagcaggtgaaggtagtggcgaataaactccaccggcgtggccgggttcagcaccacccccacttttttgcccagcgcgcggatttgattgatcacgcggaacgcgtcgcggttgatggtttcggcgtgcgggcagataaagtccgccccggcgcgggcgatcggctcgataaaatcggttgggttctccaccatcaaatgcacgtccagcaacaacgaggtatgcgggcggatctgttcgataaagaacggcgacagcgtgatgtttttaacgtagtgcccgtccatgatgtcgatatgcagcatatcggcgcggcgattcagcaccgccaattgctgccggatatccatcaggttcatgcacatcagtgaaggtgaaatctggtatttcattagcgttatcctgcgcaaaagggaaaagggatcagtggcccgccgcgattctggcctgggccgcgctgcggcgcatcgcccgccgctgctgatagcgatggcggaaaaacttcagcgccagcaccgcgatcagcaccgcgccccacatcgccagactgaaatgcgggctgacgttcatcaggttcaaaccggtcgcgatcacctgcagcacgatcagcgccaacaccacgccgctgacccggccaaaaccgccgaacggatcggtgccgcccagtatgatcgccagcaccgtgagcagcaggtaggagtcgccgtaacccatgcgcgccgagttgaagcgcgccatcatcatcagcccggcaatgacgcacagcaggctggagagggtgtaaatggcgatcaacacccgatgggtattcacgccgctgaagtgggtggcgttgatgttgctgccgctcatgtagatgcatttgccgagccgggttttctgcaagaacagcgccagcaaggcggcgaccaccaggaagatccacagcggtaccggcacgcccagcacgcgctcggcgccgataaaccgcacgatctccggcatgccgctcagggccgcgccgcgcgtcaggtaaatgccgatgccgttgaccgtcgtcatggtggccagcgtcaccagaatcggatgcgcgccgacgtaggccaccaacgcgccggtcgccgcgccgataagcccggccaacagcatcgccgccgccagcgccaacgccagccacagcgcctgcaagcccagcccggcatccgccggcaggtagctgatgaacagccaggccatcagcaggctggtcaggttggcgctggcgataatgcacaggttcaggccaccgctgaggatcgggatgaacatcgccagcgtcagcaggcccagctccggcagttggaaggccacgctggtgaaggtggcgccgctgaagaagcgccccggcatcagcaggctaaagcccagcaccaccgccagcagcaatgccagcagaccgacggcgaccccgtccggacgaaatttcaggttgttgcccatcaggcgctcctcaggcgaaaccgacgtcggtttctttgcgtttcttgtagtgagtgacggtgatcgccgcgacgatcaccagaccgatcaccacgttcatgaagtagctggacacgccgatcaggttgaggccgtttttcagcacgccgatcaggaacacgcccatcagcgtgccgaccacgctgcccttgccgccgttcaggctggcgccgcccagcaccgccgccgccagcacgtcgagctccccgcccaccagcgcgttgggcaccacttcccccatgcggtacacctgcaccaggccgccgatcgccgccatcgcgcccagatagccataggcgaacaaatgcagcaggccaacgcggatgccgatgcgccgcgccgattccgcatcaccgcccacggcaaacagctggcgcccgaggtgcgttttgttcagcagcagccaggtcagcagcgccaccgccagcatcaccagcgtcggcaaaccgagctgatagctctgctcatccagctggaacggcagcacgctgcgcggcagcgtccaccagtccggcaatgcgtacaggctgcggccgttggtcagccacatcagcatgccgaacaacaacgcctgcatgctgatggtgacgatgatcgagacgatgcgcaggcagtagatcagcagcgcgttgaccatgcccagcgcggcgccgatcgccaacgccagcagaatgctgcccgccgggctggccaggccgtagtgggtcgccagcgtggcgatcaggtactgcaccaccgaggcgactgcggcgaaggagatatcgatgccgccggtcaccagcactacaaacaggccgagggcgaaaataccgctcaccgcatagctttcgctgagatcgagcaggttttgcaccgttaaaaaccgatcgctgagcagtgaaaagaccatgaccgtcagcagcaacacccaggccagatagccttcgttgccgcgcggtttcaaactgaatctacgcattgaccgcctccgccagctgttgctggctcacctgccccggcaggtattcaccgatcacgctgccgccgctgaagtgcagcacccgatcgcagttgtaatacacctccggcacctcgtcggagatcagcaaaatggcgatcccctcctgcgccagcagatggatcagttggtagatgctggccttggcaccgacgtcgacaccgacggtcggcgagtcgaggatcaagatccgcggctgggtcagcacccacttggccagcacgatcttttgctgattgccgccggacagcgtcgaaaccgcctgatccggatccgccacccgcacgccgagcttggcgatccactccgcgacgatgcgattcttgcggtagtcgtcgatcaggcgaaaacgcccgcgcagcttatcgagaatggtcagcaccgcgttatccgccaccgactgttgctgcaccagccccagcgtcaggcgatcctccgagacgtagccgatgccggccttgatcgcgtcctcatggccgcgaaagcgcaccggtttgctgtcgaggtagagtttgccgctgtccggccgggtcatgccgaacaggctcagcgccagctcggtacgcccggagccgagcagcccgcacagaccgagcacctccccctgatgcagacggaaactcacatcctgatactgcccagcgcggctcaggcgatccgcctccagcatcacccgatccttattcaggctgggcgctttcaggcgatagtccagcttcagaccggtcatcagctcggtcagacgatcgccggtgatctccgccgccggccaggtgccgactttgtggccgtcgcggatcaccgtgacgcgatccgagatctccagcacctcgtccagccggtggctgacgaacaccacgcagatgccctgcgctttcagatagtccaccgtgcgcagcagttggttgacctcggtgcgggtcagcgaagcggtcggttcgtccatgatcaccagccgcgcctgcgccaccagcgcacggcagatcgccacctgttggcgctgcgcgatcggcagctccgccacccgtttgtcgagatccagattgaaactcagcgattgcagctggcgttcggcggcgcgccgcagccgcgccgggcggtgccaacccagcaacccgcgcaggttgtgttcgaaggcgatgttttccgccaccgtcaggttgggaaacagcgacagatcctgatagatcacctgaatgccgaaggcgcgcgcctgatccggcgacagccggccgaaggtttgcccatcgagggtaatgcggctgccgtcgtccggttgatagacgccggcgatcgccttgatcagcgtgctcttgccgcagccgttggtgccggccagacagtgcacctcccccggcatcagcgccaatgaaatatcgttcagcgcacgctgcccgccaaaggtcatcgacagctgttgcagttcgataagcggcgcgccctgcgttgccgtattgccggaaatcgccatgattacagccccattttcaccagcttcggcaggttttgcttatccaggctttcggtggcgttgccgagaatggtgtgctgctgcgcatccacctgcaccttgcccatgccttcgatggtcatgccgtcggtgattttctcccccttgtgcatcatgtcggcgatgcgcacgaacacttcgccggccaccatcggattccagatgtaaccgcccttgatggcgccgcgattgaccagcgaagcgccctggcccgggctgaacggcccgatgacgcagatatcgttgcttttgccgcggttgagcaccgcgcgcccggcgccgatcggcccctgcgagccgaacgccagtacgcctttcagatcgggatacttggccatcagatcgttggtggtgcgcacgctgtcatccagcgattcccccacgccgaacttgtcgcccaccagttgcatgttcgggtagtgctgcttctggtagttgatggccgagtccgaccaggtgatgtgcagcggcaccgtcaggctgccgacgtataccgcgtacttgccctgctctttcatgcaggcggccagtgctttcatgtggttgaccccgtgctgcgaggcgtccaccagctcaaaatcccagtcggcgtacttctggccgggggattcgtgcacgatcaccttgatgcccgcctcctgcgcgcgcttgagcaccggctccagcacccgggcgtcgttcggcaccacgccgatgatgtccaccttctgcgcgatcagatcctcgatggcgcgcacttgcagcgccggatccgccgccgtcggcccaaccatccaggcgtcgatgtcgcgtttggcgctctcgcttttgatgccggcctccatggcgttgaaccagggaatgccgccgatcttcaccaccacgcccattttcagcttgtccgccgcctgcgcggagaccgacagcagcagcgaggcaaacagaccgaccagtacggattttttcattgttctctctccacaagtgttggctgtaataagggttttcattgttgttatcgcgccgcccttttcgcggcgggtgaaacttcaatcacgtcgacgttgttccaggccagttcctgacgaaattcgtcgtcgctgagcctgtcggtgatcagcgtgtctatttcccggtaatggcaaatgcgggcgaacgagcggcggccgaacttgttgctgtccaccagcaggaacttgcgttccgacgccagcagcatctgctgcttcagccgcgcatggtgctcattgctttcgcggatgccgccgtcctggcagatgccgtggcaggagaaaaacagcttgttgatcacgaactccttcagcatctgctccgccagcacgccgataaaatcctcgtacttggcggaatactcgccccccaggccgatggtgcgcacgttggccttgcaggccagcgtctggatgatgtgcagcgagttggtcagcaccaccagcgagatatccggcagttggcgcgccaaaaaccaactggtggaactgctgtccagcagcaggcagtcccccggcgcgataaattccagcgcgcgtttggcaatgcgcgtcttctgttccggcgcctcgttgctgcgctggcggaaagattccccctggtctatctcggcgggcacataggttttctccaccgccggcggctcgacgaacaccgcgccaccgtggctgcgcagcagcaggccgcgccgttcaagcaaggccagatcacgccgcgccgtctcgatagagatgtggcacagctgcgccacctcctgcaccatcacgcggccgcgctggctcaagacttcggtgataaagcgatgacgttctacaggcagcatgtttcttttctcctccacaacgttgattacgatatcgatttgccgcgtcgcgttttgcgcgcggacgcaaagcgcatcgccctgcgatcggtcaacgatcgcgatgtgatagttgtcaaaaaaatcgggaaggaaatgaaatgaataattacgaaagtgtggagtaacaggcagttatgatgcgcgtacgcctgaggtaaacaggagagaaacggtaaacggtcacaattccacgctccacagcatgaccgttaatgaccgtttgtgtggttttgaccgagcgtcacaattagaccgccggcgttgataacgcattacctgaaaaaacggcaaaaaaaatccggtgagaacctcaccggatcgttagccgcctggcacacattattccccgtgttcatgctctttcaacatcgcctcacgcaacacggcgttcaggcgtttctgatagcctttgcctggccgctgaagccaggccaacacatccgcatcgatgcggatggttttcgatactttcatcggtttataaaaacgcccctgaaccgcagcctgccacttttcctcatccagtgccggcgcatcggcataatcgatgtcctcgtccggcaacgcactcagtgaagcaatttgcgctttctgctcctccgtcaacggcgggagtacgctatgggccagatttttggcggaatttttgcgcttcatctcttcccctctctttggcatcggccttgcgtgctgaaatgatacgcacgatctctactgtatcgccttcgacatccgtttcgatcgtcgtatgtgccaccagcaacagcaagcaggatccgaccatgccgatcgtttgccaacgttcttctccaccctcgatcctttccaacacagccaaatggttgggatccagaaaaacccgttgcgcaatctcaaaactgacacggtgtttgcgctggttactgtgatttttatcctgattccattcaaaataaacatacatttttgtaactacattttgattgttatttaatcaaaacacctcgcatccagagggatgtcaaaaccctacggatgcgttcaacgcccgcctgcggcctcgataaaggtgccggtcacgtaagatgcggcgtcagacagcaaccaggcgatcgcctccgccacttcctgcggctggccgccacgctgcatcggcaaactgtccttcacgcgatccacccggccaggctcgccgccgctggcgtgcatctcggtatagatgaatccgggccgcacgccgttgacgcgaatgccctgcgccgccacttcccgcgataacccgatggtcagcgtatcgacggcgcctttcgaggcggcatagtcgacgtactctcccgccgcccccagtcgggacgccgcggaggaaacgttgacgatggcgccgccccgcccgccatagcgcagcgccatgcgcttcaccgcctcgcggcaacacaggaagtaaccggtaacgttggtgccgagcacctgattgatgcgctcggcggtcaactgttcaatgttcgcctgctggaacagaatgccggcgttgttgaccagcgcactgagcgtgcccagcccggcatccagtgcgccgaacatcgccatcacctgcgcttcgtcggccacgtcagcctgcaatgccagcgccttaccgccctgcgcctcgatctccgccaccacctgccgcgccgcactttcgtcacgcaggtaattcacgcccaccgcatagccctgccgggccagcagcaaagcggtcgcgcggccaattccccggcttgcgccagtcaccaatgccactttcgtcatcgtattttttctctggttggcgatataaaaataacggcctgcgcacaggctccccgtttgccagtcagagtatagagcggcgctctagaaaacgcttcagagctgagccaggcggcgcagcagctttttaatccgatatttcgcgcagccggaggcgtccgttaccgccacctgatggccccgctgcaaaccggaagcatgcaggcctttgtgagcagggctgtgcacatcgccgcgaaacgacagcatcaacagcacgagcagcatcgccacgcctgaatacatcagccgccgcgaggcgcccgcgagcggggaaccgtcagtctgcatgtttcgctccctcagccatgatttcgaatggcagcaaaataactgaaatcccccctcgttcccttaacgcgagattaaagccagattaaggtttgcttaagaacgtgcaggcagcgcaggtttccccgttgtcttcccgtcagcgttatagttagataagcgcgactcaaggatctcagcggaaataacgtgaacatactgttggtggaagacgacctgcaattaggcaaggcgctgtgccgagcattggagctggccggctttaatttgtgctgggtgcgcctgctcgtcgacgcggaaaataaactttcatccggcgggttcgatttgatgctgctggatctcacgctgccggacggtgacggtttgcagaggctgatcgcctggcgcgccgccgggcaaaatatcccgatcatcatcctgaccgcccgcgaccgcattgaaagcctggtgaacagcctggattccggcgcggacgactttctggccaaaccctttgcgctgcccgaactcatctcgcgcgtcaaggcggtcaaccggcgcatggcgggcttcgcgtcacaaacctggagcctcggcgcgctgtatctcgatccggtcaaccatcaggtcatgctggataacgaactgctgatgctgtcgaaaaaagagtatcacctgctgcacgaactgatgcgctgcgccggcaccgtggtgcgcaaagcggtgttggaacagcggctgttcggccacggcgacagcgtggaaagcaactcgctggaagtgcacatgcataatttacggcgcaagatcggtaaagaaagaattattaccgtacgcggcattggttatttgctgaagaaagagtagcgaaatgatcggtttcaaatccttctttatgcgcaccattattttccaggtgctggccattttattattgtgggggatcctcgtcgcctgggtgaaatattggtattaccccgacatggagaaatatttcgataaccagcaacgcatcgtcgctgcaggcatcgccaatattctcgacgaaaccggcactgaccatatcgattaccgcggcatcatcaagaccattgaaggcatgtacattgattccatcaataacggcatgcaggatgaaatcgactatcacccgctgtttgtggtttacgatcgagacaaccgggtgctttacagttcgcaaacgcagggagagccgctgcgcctgccgccttcggtgctgtccggctcggtcaattacgccggcgccaactggcatctcgccggcagctggagcgagaatcgccagtaccgggtgatcgtcggcgaatcgttcaacgatcgcaccacgctgttcggcaacccggcggagagcaccgccgtaccgctgctgggcattctggcggccatcatcatcaccttgctgtttacggcctatttcagcctgcggccgctgcgccagatcgcccgaaccatttccgatcgtcagcccggcaatctgtcgccgatcaacgtcagcgagcagtatcaggaaatccggccggtggtggtggaggtcaataagctgatggcgcgcatcgacgccgccaatcagcgcgagaaacgatttatggccgacgccgcgcatgagctgcgcacgccgattgccgccgtgctggcgcagctgcatttgctgacccaggtcagcgagcagcaggagcgccgggaaatcatcggcgacatgcagcaagggctggatcgggcggcgtcgctgtcgcgccagctgatcaacctggccaagctggaggcggaagattttccgctgaagattgaggcggtggacatctacgccgaaattggaaaatgcatcgcgcagcacgtcccctatgcgctggaaaaagatgtcgaactgtcgctcgacggcagcgaggaggtggtggtgagtaccgaccgccatgcgctgatcgccatcttcaccaacctgctggacaatgcgctcaagtatgcgccgcccggcagccgcatcgaagccaatatccgctcgctggcgccactcggctgctatattacgttgcgcgacaacggccccggggtgagcgaagagcaccttccgcgcctgtttgagcgcttttaccgcgtgcccggcacgcagcagaccggcagcgggctgggattggccatcgcccgcaacctggccgacaaaatcggcgcgcagctgcgcgtcaccgaaggtctcgacgatcgcggcatcggctttatcatcgatttgccggaaagttaccggccacagattgagagttaaccacgagcatgatcgcccctgtactgctgcaacggcagcaactcgaccggctgtgggatatcgaccgcagcgaaattatcgacaccctgtatcgcctgcaggacggcaagctacacccctatccggactactacgatgtgcgcggctgggatccgcacgatcgggaaacctatacgccgatccacgaagcgtgcttcgatcgcggcggcgcgttcttcgcgctgttcgaaggcgaggagatcgtggcagcggcggcgctggacaccgaaccgcgcggcccgcggcaagatctgcgccagctgctgttcttttacgtcagcgcgcaccaacgcggccaggggttaggcaagcagctgttccagctctgtctgcggcaggcggcgcaagaaggcgccgccgggctgtacgtctcctccattcccaacaaaagcaccgtagacttctatctggcgcagggttgccggctcatcgaacatccggataccgaattgttcgcccgtgagccggaggacattcacctggtctgcctctgccgctagcggccggggcttaacgggcgatgcgtatcaccgaacgcacgtcgcttttcttgttcagatcccacacctcggcgatctccgccaacgcgtgctcctgcgtctcgatagtgagcgctccggtcgccgccagcgccaaaatctcggtcgcgtagcgctgcatctccgggatcggcgggaagttgccggtgccgctgccgaggatctgcagctgattgctgcgcagcaccgccgccggcagccggatgtccggcgcggccatcgagccgacgttgaccaagcgaatgccgcgccccccggcgtaagacgagagatcgtgattattgagcgtcgccagcagcgcttcggtcgccgggccccagatgtaatcgacaatcacctgataaccacccggccccgccgccgccgcgaaggcctgcgccagcgcctcgccctgcaggctcagatccaccgtggcgtccacacccaacgcctccagcacgctcaggcgccgaccggcggcaacgatgcgcccggcccccgcctgacgcgccgctgcaaccgccagtttgcccgaggtgccggtagcgccgatgatcagcaccgtttctccgggctgcagatccgctcgccagcgcagcggcagccaggcggcgaaggccggattgatcagcgccgccgccgtggcgtcgtccaccgcctccggcaccggcaccgtccatgacgcgacgctacgctctgccatcgcgccgtaagggcggcggaaagaggcgaagtacacccgttgcccgtccgccgtacggcctacgccgtcggtgccgggcacgatcggcaattgcttcgggctggaataatgagtgccggcgacggtggcgcgatccagctgcttgatgccggccgccagaacatcgatcggcacttcattcgcctgcgcctgaggctcctcaaaggtgccgaaaaccggggcttgccccagcgctgttacgattgccgcttgcatgatgactcctcaaatcgtgggaacgtacaggaaagaataggccgcgataaaataaaaagggacaccgcatcatgcggtgtcccccaaacacaaactttgccgaacgtgttattcgtaatcgctcatcggcacgcaagagcagaacaggttacggtcgccatacacgtcgtccagacgcttaacgctcggccagtacttgttctcgcgtacgccggccaccgggaacaccgccagctcgcggctgtacgggtgctgccagtcgttgaccagctccgcctgcacgtgcggcgcattcaccagcgggttgtcttccagcggccattcgcctttggcgacgcggtcgatctcgctgcggatcgccagcatcgcatcgataaagcgatccagctccactttgctttccgactcggtcggctcgaccatcagcgtgcccgctaccgggaacgacatggtcggcgcgtggaagccgaagtcgatcaggcgcttggcgatgtccatttcgctgatgccggtctcttccttcagcggacgaatgtcgaggatacattcgtgcgccacgcggtgatcgcggccggtatacagaatcggatacgcgtctttcagacgggtggcgatgtagttggcgttcaggatcgccatctggctggcctgcttcaggccttccgcgcccatcatgcggatgtacatccaactgataggcaggatggaggcgctgccgaacggcgccgcggagaccgcgccctgctgggtggttacgccgtcgatctgcaccacgctgtggcccggtacgaacggcgccaggtgcgctttcacgccgatagggcccatgcccgggccgccgccgccgtgcgggatgcagaaggttttatgcaggttgaggtgcgaaacatccgcgccgatgtagcccggcgtggtgatgcccacctgggcgttcatgttggcgccgtccagatacacctgaccgccgaactgatgcacgatctggcacacttcacggatggtttcttcatacacgccgtgggtcgacgggtaggtcaccatgatgcaagagagttcttcgcctgcctgctccgccttgacgcgcagatcgtgcagatcgatgttgccgttcttgtcgcaggcgaccaccaccacgctcatgcccgccatctgggcggaggccgggttggtgccgtgcgccgagctcgggatcaggcagacgtgacggcccgcttcgttgcggctttcatggtagcggcggatcgccagcaggccggcgtattcgccctgcgcgccggagttcggctgcatgcacaccgcgtcatagccggtcagctgcaccagccactgagacagttggccgatcatctgctggtaaccggcagcctgctccggcgggcagaacgggtgcagttcggagaattcaggccaggtgatcgggatcatttccgccgcggcgttcaatttcatggtgcaagagcccagcgggatcatcgcctggttcagcgccagatccttacgctccaagcgatgcatgtaacgcatcatctcggtttcgctgtgatagcggttgaataccgggtgggtcaggatcggatcctggcgcagcatggcggccgggatcgattggctgtttttgctcaccgccgcgtccagcgcgtcgatgtccagaccgtgattgtcgccggccagcagtgcgaacagcgtttgcacgtcttcacgcgaggtggcttcatccagcgtgatgccgacggcgccgtgaatgtcggtacgcaggttgatgccgaagctcagcgcgcgctccagcacggcggccttgtccttcacttcgacggtcagggtgtcgaaccaggtgtggtgacgcagcgtcaggccggccttctgcagcccggcggccagaatgtcggtcaggcgatggatgcgcccggcgatgcgctgcaggccttgcgggccgtgatacaccgcatacaggctggcgatgttggccagcagcacctgcgaggtacagatattcgagttggccttctcgcggcggatatgctgctcgcgagtctgcatcgccatgcgcagcgcggtgttgccggcggcatcgcgggaaacgccgatgatgcggcccggcatcgagcgcttgaactcgtcgcggcaggcgaagaaggcggcgtgcgggccaccgtagcccatcggcacgccgaagcgttgcgcggagccgaacaccacgtcggcaccctgcttgcccggcgcggtcagcagcaccagggccatgatgtcggcagccacgctggtgatgattttgcgcgatttcagttcggccagcagcgcgctgtagtcgtgcagttcaccggtggtgcccacctgctgcagcagcacgccgaacacgccgtccagctccagcactttttccgctttatcgacgatgacgtcgaagccgaaggtttcggcgcgggtgcgcaccacgtccagcgtctgcggatgcacgtcgtcagccacgaagaagcggttggcgtctttcagcttgctggcgcgtttggccaacgccatcgcctcggcggcggcggtggcttcatccagcagcgaagcggaggccagatccagaccggtcagatcgagggtcacggtctggaagttcagcagcgcttccagacggccctgcgacacctccggctgataaggggtgtaagcagtgtaccagcccgggttttccagcatgttgcgcaggatcaccggcggcgtcagcacggcgctgtagcccatgccgatataggatttgtagcgctgattctgcgaggcgatcgccttcagctcagccagcgcctggtgttcggtcgccgcgtcgccaaccggcggcggccccggcagctgaatgtccgccggcacgatctgttggatcagcgcgctgagcgagcgagcgcccaccgctgccagcaactcctggcgttgttccgcagaagagccgatgtggcgttcgatgaacgcttcgctgtgttcgagttggctgagtgtctgagtcattgctacaaattcctgaatgcttgcgtgatacgggatatagcttgaacggtaactaaaacgccccggccgaaaggcctggggcgtgggcacgattactcgtcgatcgaggcctgataagccgcggcgtccagcaggttcgccagctcgccttcgtcggaggctttaatctggaacaggaagccgtcaccgtaaggttcgctgttcaccagctccggggagctttccagctcggcgttcaccgccacgatttcaccgctgattggcgcgtagatgtccgacgccgccttgacggattccgccacggcgcagtcttcaccggcggcgactgtgcggcccacttccggcagatcgacaaacaccatatcgcccagcagttcctgcgcgtgttcggtgatgcctacggtgtaaacgccgttaccttctgcgcgaacccactcgtgagaggatgcgtatttcaattctgttggcacattgctcatcgccggttactccttcgaagaaataaaagaatcaatcaataaaaaatcaatttgtcagcggcttgccggcgcgaacgaaaccaggcttggtcactttgaccggcatctcgcggttgcggatctgcacgatggcctgctcaccgatacccgccggcacgcgcgccagcgcgatgctgaagcccagcgtcggggagaacgaaccgctggtgatcacgccttcgtgggtttgccccgccgcgtcggtgaaacgcaccggcagctcattacgtaatacgcctttttccgtcatgatcaagccgaccagttgctcggtgccctgctcgcgctgttgttccagcgcttcgcggccgatgaaacggcgatcttccggctgccaggcgatggtccagcccatattggcggccagcggcgaaacgccttcatccatctcttgcccgtagaggttcatgcccgcttccaggcgcagggtgtcgcgcgcgcccagaccggccggcttgacgcccgcggccagcaatttttgccagaaatcagccgcctgctctttcggcagcgcgatctcatagccggcctcgccggtgtaaccggtggtggcgatgaacagctcgccggcctgcacgccgaagaatggcttcatgccttcgaccgcgcttttttgttccggggtgaacagggtgccggcgcgctctttggcctgcgggccctgcaccgcgatcagcgccagatcgtcgcgcaccgtcagcgcgacgccatacggcgcggcgtgttcttcgatccaggccaggtctttgtcgcgggtggcggagttcaccaccaggcggaaatagtcttcagtgaggaaataaacgatcaggtcgtcgatcacgccgccggaagcattcagcatgccggtgtacagcgctttgccgggttgggtcagtttggcgacgtcgttcgccagcaggtagcgcaggaactcgcgggtgcgagcgccgtgcagatccacgatggtcatgtgagacacgtcgaacatgccggcatcctgacgtaccgcgtggtgctcatcgagctgcgagccgtagtgcagcggcatcatccagccgtgaaagtctaccatgcgcgcaccgcacgccacgtgctggtcgtacagtggggtttgctttgccatcttttccctctttccactcgtcgctagaagttagggtgctgccacgcaatgcggcggagcctggctcgcggcccgatcgccatggcgcactgactgctcaacacaaatgctgcgccgggacgggcgaaaactgcgtgcaaccgccgtgacgcaaacgatacctttcccccgaacttatcaccgaacgaccacattaaccataagttaaaataggctcatcgccgttccggggcggtaaaatgccgggctagtgtgcagagtttttcactggaaaaatgcgccttaaggcacaaaattaacaattaaagcggcaaaatgccgaacttatataacaaacctatggccgcacatgggatccggacttttgataaccgaacatggaattagaaaaagtaatgataaaaagcggctgaaattagattatttcaaatgaagggttatataaggaaacgcgatggcataaagcgagaagcgcgagcccgctgcgggctcgcagaaggcaggtgtcaggcaagccactcgggcagatcgttcaggcccatcgcctgacgcaccagcttaggcttgacgccaggcaggctgcccgccagccgcagccccacgtcgcgcagcagctttttggccgggtggttgccgtcgaacagttcgcggaacccctgcatgctggccaacatcaccgccgcgccgtgtttgcggcggcgctcatagcggcgcagatagaggtgctggccaatatccttgccctgccgctgcaggcggcgcagttcggaaatcagctcggcggcgtccataaagcccaggttcacgccctgtccggccagcggatgcacggtatgcgccgcatcgcccaccagcgccaggcggtgcgccgcgaagctgcgcgcatagcggccggtcagcgggaacgccagccgttcgctttccaggctgcaggcgcccagacgcatatcgaaggccatcgccagttcgcggttgaattgttccggctccagctgcttgagacgctcagcgtcttccggcgcgaccgaccagacgatggagctcaaatgcggatcgctgaacggcaggaacgccagaatgccgtcgccgtggaaaatttgccgcgccgtagcctgatgcggctcttcggtgcggatggtggccaccaacgcgtggtggcgatagtcccagaaggtcagcgggatatcggcatgctggcgcagccatgactgggcgccgtcggcgccaatcaccaaccgggcggtcagcatacggccgtcctccagcgtgatgaaggcgtcattctcgccccacgccacctgcttgagcgcggccggggtaatcagcgtgatgtccgacaggctttcggcgcgcttccacagcgcctgctggatcaccgaattttcgatgatgtggccgagatggctgaaaccgcactcgtcgccgcggaaggcgattttgccgaagctgtcgcgatcccacacttccatcgcgttgtaggcgctggcgcgctgctggaggatgtcgtcccacacgccgatatgctgcagcaaacgctcgctggcggcattgatggcggaaacgcgcagcgcaggctgctccgacggcggcgccatatccggctggcgctgctccagcaccgccacgcgcagcccgctgccctgcaggccgcaggccaacgccagccccaccataccgccaccggcgataatcacgtcaaatgattgcatgctgctcgatttccttaaataacgcgcgacgccttgccacgccgcgtttttgggcgcgccacagggcgcccgattctgtgtctaacgttccacccagcccaatgtgcgcttggcgaaggcgtcgcgcaccgccggcaaacgctccatcgccatcagccccagattgcggccgaccaccagcggggcataacggttggcgaacaggcgaatcaatccgtcggtcacgccgatcgtcgcctgctgatcgttttgtcgccgctgctgatagcggctcagcagcgcataaccgccggcgtcttcgccgctgttcatcgcttccgccagcgtttccgccagcgacatcacatcgcgcagaccaaggttgaacccctgcccggcgatcggatgcagcgtctgcgccgcgttgcccaccagcgccagccggtggctgacatgacgatcggcggttagcaggccaagtggataactgtgccgcttaccggccttgaggatgcgccccagccgccagccgaaggcctgttgcagctcggcgataaaacgcgcgtcgtcccaggcatccacccgggcgcgatcttcgcgcgcatggcaccacaccagcgaactgcgcccctgtgacatcggcaacagcgccagcggcccataacgggtaaagcgctcgaaagctcgcccctgcggatcttccgccgtggtgacgttggcgatggtggcgaactgcggatagtcctcctgccgccactgcacgttgcaggcctgcgccagcgccgaacgcgagccgtcggccgccaccagcagctgcccgcgcagacgctggccgttgtccagcagcacttccgcccgctccgcggtgcgaatcacgtccaccacccgcgccgggcagtgcagcgtgacgcccggcgccttcgccagcagcgcgaacagccgctgcccggcgtcgtgcagttcgatcacctgaccgagcgcatcgacctgataatcctgcgcctgcagattaacgaaaccggcgtgaccgcgatcgctgacgtgcacctgagtgatcggcgtggcgcagtcgcgcagcgccggccaaacgccgatgcgcgccagctgttggcaggtgccctgcgccaaagcgatggcgcgagcgtcaaagcccgggtggctgcggtcgtccggccgggtcgcctcgaccaaatccaccgccatttttccctgagtaagcgacgaaatggccagcgccaacgtcgcgcccgccatcccgccgccaacgataataacgctcatgctacgaccttgccgccgccatcaaggcctcgatggcatcggcgtctttcaccacggtggcggtcaggttttcattgccgtcggcggtgatcacgatgtcgtcctcgatgcggatgccgatgccgcggtattcctccggcacgtccgcatccggcgcgatatacagccccggctccacggtcagcaccatgcccggctccagcagccgatcgcggctcggcgtgccgtagtggccaacgtcgtgcacgtcgagacccaaccagtggctcaacccgtgcataaagaactgacggtgagcctgctcggcgatcaattgatcgacttcacctttcaatacgcccagctccaccagcccgaccaccatgatgcgcaccacttcgtcgttgacttcgcggatgctggtgccgggcttaaacagctccagcgcacgctgcagcgacgccagcacgatatcgtacaccgcgcgctgcggccggctgaacttgccgttgaccgggaaggtgcgggtgatgtcgccggcatacccctggaactcgcagcccgcgtcgatcagcaccagatcgccgtcgcgcatctggctctcgttctcggtgtagtgcaggatgcagccgttttcgccgctgccgacaatggtgttgtaagacgggtagcgagcgccgaggcgggtgaactcatgatgaatttccgcttccagctgatattcgaacatgcccgggcggcatttttccatcgcgcgggtatgcgccaacgcgctgatctcaccggcgcggcgcatcaccgccagctcttccggcgatttgaacaggcgcatgtcgtgcagccacggccgccagtcggtcacggtggcaggcgcctgcagattctggcggaaccccttgcgcagcttgtccaacgcgccgaacaggatctgatcggcataggcgtattcgccctgcgcgtggtagaccgcatccaggccgttgagcagcaggtgcagttggtcattgatttcatcgaacggcagcgcgcgatccacgcccagctttgccggtgcggcgtcttgccccaggcggcggccaaaccagatttccgccgtcaaatcgcgcacccggttgaacaacacgctgtggttgtgcgtttcatcgcttttaatcagcaccagcaccgcttccggctcattgaagccggtcaggtaccaaaaatcgctgttctgccggtagggatagtctgaatctgcactgcgcgtcgtttccggcgcagagaaaataaccgccgcgctggccggcgccattttcgccaacagcgcctggcggcggttgttgaattcctgctgagtcattaccttctcctgaaatcatgccatccgcaccgccggcggaggggcgatagaacgtttagtgcagcgtcggtttgatattttccggcgccgtcggtttgtgacgggtgaattcgccgtggcacatgatggcggcgacccgcacatactccgccacttcttccaacgactgttccaattcttcctgatcttcgtcttcgtcgtagcccagttgcgcgatgttgcgcagatcgtcgatcgcttcaccgacttcgtctttcacctgagccagcttcggctgcatcatgcccagaccgagcaggaagtggttgacccaaccggccagcgcgtcggcgcgatcgaacacgctgacgatctccccttcaggcagcatcagttggaacaggaattcgtcatcttccagcgtgtcacgcgtcgcttcatacagctgctgcaacggttggctgagcgcctgtgggaaggcgacgccttcgttggtcagatcgtgcaccagcgcctgccagccggcgtcacggctgccgccacacagcaggccgctgatcaggccgtgcatttctgccgcggtcaacgccaccgactgctggttgagggccacggttaaagattggtaacttggaaatgtattctgtatagacatgcgcattcgtcatcgttggcaggataagttcgtgttatgctaccaccaaggtccgtcgctataccagataagcgcgacacctcagtggctagttataatcgcgatgtggcaggtttcacactgcgccggcgggtgacgaaagtgcggtaaatacgcattttgaaacccttttttgactggcaatgtgcgccacagtagattacaaccaggtactgaaaaaggggttgtatcttggtaccgaggtatatatagtggcgcccgctttgacggcccggccagggcggacaaggctggcgcgaaatttaggcaggaaggtggcatgtctgcacaaccggtagatattcaaatttttggccgctcgttaagagtcaattgcccgccagaacaacaagatgcgttgaatatggcggcggacgatcttaaccaacggttgcaagatcttaaagttcgcactagagtctccaatactgagcaactggttttcatcgcggcattgaacgtctgtcacgaacttgctcaagaacggttgaaaacccgtgactatgcgtccaatatggaacaacgcatacggatgctgcagcagaccattgaacaagcgctgcttgaacaaggtcgcatctctgaacgtcaggatgcacaattcgaataacttaagttgttgaaatcacagttttcagcaacgagtacaaaatttctctgagatgttcgccagcgggccagtcccctgagccgatatttagtacaaacagaatgtgttgctccgcgatcggtgagcacgctcggtgcgccgagaagccttaagattgcgacggcacgttcaccttgaaccatgggttcaagggttacagcctgcgacggcatctcggagattccccttctcagcggtttatgtgtgctgaacaccacacagagcaagcctgatacgatgccttttcaaccccaattcgcgcagcagcgccaaaccattcgtcaacacattcgccaacgtcggcgcgagcttacgccgggccagcaacgctttgccgcagaaaagatagccgaacgcctcgtcacgcatgaacgcattcagacggcgcacagcatcgcggtgtttttgtcgtttgacggcgaactcgataccgggccgctgatcgaacggctgtggacgctcggcaaacgggtttacctgccggtgctgcatccgttcagcccgggccacctgctgttcctgcgctatgcgccggaaacgccgctggtgcgcaatcgcttcaatattctcgaaccgcgcctcgatgtgcgcaaggtgttgccgctgggtgaactggaggtggtgctgacaccgctggtggcgttcgatcataccgggcagcgtctgggcatgggcggcggcttttacgatcgcaccctgcaaaactggcgcagcggcggcccctatcccatcggcctggcccatgattgccagcaggtggagcatctgccgaccgaacactgggatatcccgctgccggaaatcctcaccccgctctgcagctgggcgtggcacgagccaaaatagcaaaaggccggatcgctccggcctttttcgttgcggcatgccgccgaatcagaacagcaggcgggcgcggatggtgccgtcgatggccttcatgcgctgcagcgcggcgtcggcgcgcgcggtttccgcttcgatgtcgatcaccacatagccgatttccggcccggtttgcagatactgtgcggcgatgttaaccccctcttcggcaaagatctggttaatctgcgtcagcacgcccggacggttttcgtggatgtgcagcaggcggctggcgttcgggccatgcgccggcagcgacacttccgggaagttgacggcggacagagtcgatccgttgtcggagtatttcgccagcttgccggccacttcgtcgccgatgttctcctgcgcttcctgagtggaaccgccgatgtgcggcgtcagcagcacgttgtcgaactcacacagcggcgagttgaacggatcgctgttggtcgccggctcttccgggaagacgtcgatcgccgcgcccgccaggtgattgctggccagcgcgtcgcacagcgcgggaatatccaccacggtgccgcgcgaggcgttgatcagaatggcgcccggtttcatcagcgccagttcttccgcccccatcatatttttggtcgatggcgtttccggcacgtgcagcgtcaccacgtcgctcatattgagcagatcggacagatggcgcacctgctgcgcattgcccagcggcagcttgttctcgatgtcgtagaagaacaccttcatgcccagcccttcggccagaatgcccagttgggtgccgatatggccgtagccgatgatgcccagctttttgccgcgcgcctcataggagcccacggccagtttgtgccacacgccgcggtgcgccttggcgttggcggccggaatgccgcgcagcatcaacagcagctcgcccagcaccatttcggccacggatcgggtattggagaagggggcgttgaagaccggaataccgcgtttggtcgccgctttcagatcaacctggttggtgccgatgcagaagcagcccaccgccaccagtttttctgcggcggcgaacacctcttcagtcagatgcgtacgcgatcggatgccgacgaagtgtgcatcgcggatggatgccttcaaagattcggtgtctaacgcacccttgtggtattcgatgttggtataaccggcggcacgcaaattatcgaccgtgctctgatgaaccccttccaccaacaggaatttaatcctgtctttctccaatgatacttttgccatttacccgaccctatgttcagacttcagaagcggctgtgacgacacagctcccatccaacataacaaaaataacgcgggcggcaatacaaacgattgcctgcccggcaggacaaggcgcagcgttgatggcggtttacggcagaaaatgccatagggaaagttttcggcagaagctttggggagtcagttttcacaatgtgacataagtcaccaaatttgccgtttttcagaaaagatattttaaccgaagaattatgcggcccggcaccgccgggccacagacggcagaagcttatttgaccactttcacgccttccggggtgccgaccagcgccacgtccgcgccacggttggcgaacagccccacggtcaccacgccggcgatgccgttgatcttgttctccagcgccacggcgtcggtaatgctcaggttatgcacatcgaggatcacgttgccgttgtcggtcaccacgttctggcgatactccggcaggccgccgagtttcaccagctcacgcgccacgtaagagcgagccatcgggatcacttccaccggcagcgggaacttgcccagcacgtccacctgcttgctggcgtcgacaatgcagataaacttcttggcaatggcggcaatgatcttctcgcgcgtcagcgccgcgccgccgcccttgatcatctgcatatggccgttgatttcgtccgcgccgtccacgtaaatatcgagcgagtccacttcgttgctgtcgaacacgtggatgccgaggcttttcagcttggcggtggaggcatcggagctggacaccgcgccttcgatctggtgcttgatggaacccagcgcgtcaataaagtgggcggcggtagagccggtgccgaccccgacgatggtgcccggcgtcacgtattccagcgccgcccagcccaccgcttttttcagttcatcctgcgtcataatatgtcccttgcctctgtacgaaaacgtgtgcgtattatagggtaaaacgctgtttttcacgccggcaggatcacacttatttaccgcagcccgcatttttacccgcctggcggcgagctgggagcgtaatttttccacctgcgccatgcgtaaaatgtggcatagtgccggtatcattctaatttaagggatatctttccgatgaaacgcccagactatcgtacgctgcaagcgctggacgcggtgatccgtgagcgcggcttcgagcgcgccgcgcaaaaactctgtatcacgcaatcggcggtatcccaacgcatcaaacagttggaaaacctgttcggccaaccgctgctggttcgtaccgtgccgccgcgcccgaccgaacaggggcaaaagctgctggcgctgctgcatcaggtggagctgctggaagaagagtggctgggcaacgacaccggcgtcgatacgccgctgctgctgtcgttggcggtcaacgccgacagtctggcgacctggctgctgccggcgctgaagccggtgctggcggactccccgattcgcctgaatctgcaggtggaagatgaaacccgcacccaggagcggctgcgccgcggtgaagtggtgggcgcggtgagtattcagccgcagccgctgccgagctgcctggtggatcggctgggggcgctggactacctgtttgtggcctccagcggcttcgccgagcgctatttcccgaacggcgtcacccgttccgcactgctgaaagcgccggcggtggccttcgaccatctcgacgacatgcaccaggcattcctgcagcagaacttcgatctgtcgccgggcagcgtgccctgccacatcgtgaactcatcggaagccttcgtgcagctggcgcgtcagggcaccacctgctgtatgatcccgcatctgcagatcgaaaaggagctggcatccggtgaactgatcgatctgacgccggggctgtaccagcgccgcatgctgtactggcaccgcttcgcgccggagagccgcatgatgcgtaaagtgaccgacgcgttgctggagcacgggcatcaggtattgcgccaggattaaaacgaaaaaaggttcgccgcggcgaaccttttcttcaataccacacccttactgcgcggcgttacgctgcagctcgaacaccacatccacctgatcgtcgaagtgaatgctttgctgttcataggtttgcgccgcgtcgttttccgccgccgcgccggccgccttatacatccgcgccaccggcatcggctggtagttggcgacccggtagcgaatgctgtacaccggccccagcttggcgtggaagcctttggccagggattcggcctgctgagtcgcgttctcgatcgctttttgccgcgcctgctcgcgatacacgtccggcttggcgacgcccaactccaccgcgcggatctcgttcaggccggatttcaacgcgccgtccagcagctcgttcagtttgtccaactggcgcagggtgacctgcacctggcgcaccgcccggtagcccttcagcaccgactcgccggttttcaggtagtcgtattccggctgggtgcgcaggttggcggcgctgatgtctttcttctcgatgttgtttttctgcaggaaatcaaagtactgcgccacgcgctcgtctacctgcttcttcgcctgggcggcgtctttggaggaaacgcttacctcgatcgccagggtggcgatatccggcgtggcgtccacgctggcggtgccggaggtgacgacgtgcggcccttcaggcaattcagccgcctgcagcgccatcggtaacgtccctaatccgaccattgcggccatagccaatgcttttagcttcacagtgtctccttaatgacaggctgtctctgatcgccggcttttccctgcgagaaccgccggattcctggcatcaaacgtagcatatcgcacggcgttttgaattcggattagtgacaaattcttataaatttgccccctgccaggccagctgcagcgcgatgccccacatcaccaacccgaccagcgcattgatgatgcgctgcgcccgctgcgtattcagccacggcgccagccaggaggccagcagcgccaggccgaagaaccacaccgccgacgcgctgaccgcgccaagcgcgaaccaggaacgcacgtccgccgtcagctgtccgcccaggctgccgagcaccacgaaagtgtccagatagacgtgcggattcagccaggtgaccgccagcatggtgaccacgatgcgccagcggctctgcgccagctcctgcgccgcggcctgcgccggttgcgggctgaaggcggaacggaacgcgccccagccgtaccaaagcagaaacgccacaccgccccaggtgactagcgccaacagcagcggcgagcgggtcagcaacgcgctgccgccgaaaataccggcgcagatcagcacgatatcgctcagtgcgcacaatgaggcgatcatcaaatggtactgacggcgtatgccctgattcatcacgaatacgttctgcgggcccagcggcaggatcatggcggcgctcagggcaaaaccctgcaggaagacggctaacatgggaaattcctcgaatgataaaaggcgccggacgtgggcgcgtatcggtcaacacgcgcatcatacgaggaagcgatcattaggtgaaattgatgtttctaatccagtatcagaagcactaatactccaagcggcgggattgcgccgtcaaattcgctcatcgacgcgaaattcgctatcatccgcacccaccctccagccggccgcccgatgtctacgatcaccgatacctttatcgccccgccatgccatgaccagatagagatcctctatcaggacgatcatctggcgctgatcaataagccggccgggctgctcagcctctcgggcaagaatccgcagaatctcgattcggtacaccaccggctggtacagctgttccccggctgcgccctggcgcaccgcctggatttcggcacgtccggtttgatggtggtggcccgcaacaaggccgtcaacgccgcgctctgccggcagttcagcgaacgcaccgtcggcaaagtgtacagcgcgctgctctgcggccatctggcggataacgaaggggtaatagacgcggcgatcgccaaagatccggcgctgttcccgctgatgtcgatttgcgccctccacggcaagcccgcccgctcccgctatcgggtcgtcgaacgtttttatcgtgaaacggaaggcgggatctcgctgccgctgacgcgggtgcagctcaccccggagaccggacgcacccaccagctacgtattcacagccggcaattgggccatcctattttaggttgcgatctgtatggcgggcgcctgctgccgggtaccgagcagacgccgcggctgatgctgcacgccagcgagctggactttgtgcaccccatcagcggagagcggatagccgctcgtcacgccgcgccgttctgaacgcggcttaccacatcaaatcgtcgggcactttaaagtcggcgtacggatcgtcttcatcctgctcttcctgactcagcgcactgtgcagcactatgctggccgcatcgcgctgcgcgattttatcggcgacgctcgcggggataatcgcgtattcacactcttcgcggctctcgacaaccaagcgggcaatggcgaggcggccattgatcagctgcgtctgggtcgctttatccaccaggattttcttgatcaggttaccgtcggtgaagttgaaaccgatatcgcctttcgccaggacgatgcggttcatctcgatcagctgcttcacctgcgccttgtattctttggacagcgcggcctgcttttgctgctcgctcaattgcttatcgcgctcaagctgcgcctttttattctcttccaccgcctctctggcctcgcgcgcctgaacgcgtgattttttagccgttctctggactttggccattttcttgctggttaccaagcccgctttgagcatctgctcttgtaaggtgagttttgtcatgttcgtgtctgaagccgtggggtcatggtgggattatacccgtaatttttcaggctgcaccagcttgccgggcggcttgcaacgcagggcaacggcggcaaccccacctgaaccccagatcatgaatgtggctcatgtggtaatgaaattaagtctctttcactcccaccgggactctggcaaaaatagacctcattaacgacagacaatatgaaatcggctgaatgaaaaaatagaaaaacaagccattgaaataaatggataaacccagccctcatatcatataacaggatgctataagacgatgaatagagactttacctttacgattaagagcagttctttcgatgaagattataacccttctgaaaatacgcgtatcaccaccaacttcgccaatttggccagaggagaaaaccgccgggagaacctgcgcaacacgctggtgatgattaacaaccgcttcaattcgttggcgcattgggataaccccaaggccgatcgctatgcggtcgagcttgaaatcatttcggttgagatgcgcattgaagatcacagcgccagcttcccggtgatagaaatcctgaaaaccaacatccttgataaaaaaacgcaaacgcgtatcgagggcatcgtcgggaacaatttctcctcttacgtgcgcgattacgactttagcgtcttgctgccggcgcacaataaaaacacggcggaatttaccattccggatgatttcggcgatttgcatggcaatatctttaagcacttcgtcaattcaaacgaataccatgagaatttcagcaaaccgccggtgatctgcctcagcgtgtccagcaaagacacctatcatcggacgggcaatcaacacacggtcttgggcgacgagtatcggcaagacggcgcttcgctgaccgaccggtattttaaaaaaatgggcctgcaggtgcgctatttcatgccgaaaaatagcgtcgcccccctggcgttttatttccccggggatttgctgagcgattacaccgatctggagctgattggcaccatcagcacgatggagaccttccaaaaaatctatcggcctgaaatttacaatgccaactcggcggcggggcaatgctatcagccaagcctgaataaccaggatcattcattaaccaagattgtttacgatcgcgaagagcgtagccagttggcgatcgagcaggggaaatttacggaagagcaatttatcaaaccctacaagcctattcttgagcaatggtctgcccactacgcgctttgattcacttaaatacaggtcacctatcatgaaaatattgctccccacatcgaccgccggcagcttacccaaaccggtctggctggcccaaccggaaaccctgtggtcgccctggaaattgcaaaatgaagaattaatcgaaggcaagcaagacgccctgcgtttatcgctggcagagcaacaacaggccggcatcgatatcgtcagcgatggcgagcaaacccgtcagcacttcgtcactacgtttatcgaacacctcagcggcgtcgatttcgagaaacgcgaagtggttaaaatccgcaatcgctacgaggcgagcgtgccaaccgtggtgggggcggtctcgcgtcaaaagcccgttttcgttgaagacgccaaatttttacgccagctgacccagcagccgattaaatgggccctgccggggccgatgaccatgatcgacacgctctatgacaaccactataaaagccgcgagaaattggcctgggagttcgccaagatcctcaatcaggaagccaaagagcttgaggccgcaggcgtcgacattattcagtttgatgagcccgcatttaacgtgttctttgacgaggtgaatgactggggcatcgccgccctggaaagagccgttgaagggcttaagtgtgaaaccgccgtacatatctgctatggatacggcattaaggccaataccgactggaaaaagacgctgggctctgagtggcggcaatatgaagaggcgtttcccaagctgcaaacgtcgactatcgatattatctcgttggagtgccataactcgcacgtgccgatggatctgcttgaactgatccgcggcaaaaaggtgatggtcggcgccatcgacgtggcgaatcatgccgttgagacgccggaagaagtggccgacacgctgcgcaaagcgctgcagtttgtcgatgccgacaagctctatccgtcgaccaactgcggcatggctcccctgcctcgtcaggtcgcccgcggcaagctgaatgcgttaagcgcaggcgccgagatcgtgcgccgagagctgttggccaaataaccgcgccagcgcccgccgcagtagcctcctgcggcgggcgattatcaatcgactccttctccccgcaacgcccccgcgctggtgtatactcggatttctacgcgatgccagccacagcggcctgaacggcccctcagccagcccacaccagcttaataacagtggaaccctcatgagcccagataccgctcgcatcagcgaaatcatcgatcgcgccaggatctcaccctaccaaatcctgatcctgaccttatgtttcctcatcgccctgctggacggcttcgataccgccatcatcggctatatcgccccggcgctgcgcgaagagtggggcctgcagccagcgcagctctcccccgccttcggtgcgggattgttcggtctgctgatcggcagcctgctgttcgggccgatcgccgacgctatcggccgcaagcgcgtgctgctcgtcgcggtgctggtgtttggcggctgcaccctggcttcagcctatgcgcattcgatcgaatccctgacctggttgcgctttatcaccggcattggcctcggcggcgcgataccgacctgcatcaccctcagctctgagtactcaccggcgcgccggcgcatgttgatggtcaccctaagctggagcggctttaccgccgggctggccctgggcggcctgctggccgggcagatcattccagcgttcggctggcgcggcctgctgctggtcggcggcattgcaccgttggcgctgctgccgctgttggcctggcagatgcccgagtcggtgcgctttatggccgccagcgccaaacatgccgatcggctgcgccgggtggtcgagcgtatcaccggccagcgttggacggggggatccattttcgatgacgagcgcccggcgcaggccaggtcgccgatctcgcacctgtttatcgaagggcgcgccgtgcgcaccctgctgctgtgggcggcattcttctgttcgctgttcgtgttctacctgctcaccagttggctgccgacgatcctcaaagacgccggtttcgatatcgcccacgcctcgcgcatcggcgcgatggtgccgctcggcggcaccctgggcgccatcctgatggcgctgctgatggatcgggtcgggccctatcgcgtgctggccttctcctacctgggcgccgcgctggtgatcggcgctaccggttacctgatgggcgacgcatacacgctggccgccgtcgtgttcctgataggcttcggcgtggccggcgcgcaaaacggcctgaatctggtttccgccaccctttacccgaccgcagcccgcgtgaccggcgtcagctgggccatggccaatggccgcttcggctcgatcgtcggctcgatgctcggtgcctggatgatgaccgccgccggttcgccggaagtgttcttcctctggctggcgctgccggcgctgctgggcgcagccgccatcttcctgctttatcgcctcagcctgcgccgccgcgcgccgctcaccgaaccggcggccggcatctgaactcgcggaaaataaaaggccgagacgccatcagtgacgtctcggcctgcaataaaaaagggggctaaggccccctctctgttattccgccttggcggaagcgtcttcggtgcgatacaggtgcacgtccatctgcgggaacggaatgccgatgttgtgggcatccagcgcgcgcttgaagttttccatcagatcgaagtacacgttccagtattccgcgttggtggtccaggaacgagtcacgaagttcagagaggacggcgccatctcgttcagacgcacggtcacgcctttagcgtgcataatgcgcttgtcggcggcgatcacgtcgcccaacaccttcttcaccacgtcgatatcggcgttgtaggccacgcctaccacgatgtccacgcggcggttcggttcgcgggaatagttgatgatgttgccggcgatgattttaccgttcggcaccacgatggttttgttgtctgcggtacgcagggtggtggagaaaatctgcacctgatcgacggtaccggccacgccgcccagatcgacatactcacccacgcgcagcgggcggaagatcaccagcagcacgccggcggcgaagttggacagcgagccttgcagcgccaggccgacggccaaaccggcggcacccagcacggcgatcaccgaggtggtctgcacgccgacgcgccccagcaccgcgatgaaggtgaacgccagcacgccgtaacgtacgatcgccgacaggaagtccgccaccgtggcgtcgatgccgcgcagcttcattacgcggttcagcgcattgccgaccacgcgggccacgatcgaaccgatgatcaggataacgatggcggcgacgatattcaccgcatactggatcaacagatcctggttcttcaccaaccagtcgccggcaccgttgatgccgtctactacattcaaatctttcattcgtgtcgtcctaactcagtccctaacgggagaaactcgcaaaaatacactggcttcggcagccagtaggaaaccaccgcctaagggtaaccaacattaaaggctcatgccaaccgtcagcgttaaaaatagccgaaaccgcccgccgcttcttctatgctgaaaacagcgcgttggccatttcacgacaagggatccgttcttcatgcacattcgctcttcgcttaaacactattggcaagtgcggcccaggctgctgctttccgtcggcgccgggctgttgtgcttcctgcttctgcccgcccagctctcgctgctgcaacgcttgatgatcggctggaatacgctggcctggctctatctgctgtttctctggcggctgatgctggtcagcacgccgcagcacattcgccagatcgcccggcgacaggatgaaagcgccagcacggtgttggcgctggtcagtttcggttgtctggtgagcattctggcgatcctgttcgaattgagcagcgccaaacaggccagcgactcgctgaaaaccctgcatctggcactaaccggcggaacgctggcggtatcctggctgctgctgccaactgccttcaccatgcactatgctcatcagttttatcgccagggcgcacagcaggatcctttgccgctgctgttccccggcaatctcaccgagccgacctatctggatttcgcctacttctccttcaccatcgcggtcgcgtcgcagaccgccgatgtggcggtcggcgccgcggaggtgcgtaaaatcgcgctcgtgcagtcggttatttcgttcgtgttcaacatgctgatcctgggcctgtcgatcaacgtcggtgccggcctgctgggctgaaaacgaaaaaggctccccgcagggagccttttaatcacaaacaaaggaggaaaaaacgtggtttttcctcctttgtgatcatcagccgaaaatcaataaattgattttccttattttttatattttgccaacggcgagccaggcaacgccatcaggcttgtcataaacaacaaggctccccgcagggagccttttgcatagtgcaacagctggcgaagattacagaacgtctaccgcgttcagatctttgaaggcctgctccagacgcgtcaccatgctggtctgcgctgcgcgcagccagacgcgtggatcgtagtatttcttgttcggctgatcggcgcctttcgggttgcccagctggccctgcaggtaagcttcgttcgctttgtagtactgcaggatgccgtcccaggtcgcccattgggtgtcggtgtcgatgttcatcttgatcacgccgtagctgacggactctttgatttccgcatcgctggaaccggaaccgccgtggaacacgaagttcaggctgttatgcggcaggttgaatttctcggaaacgtatttctgagaatcgcgcaggatggtcggagtcagcttaacgttacctggcttgtacacgccgtgcacgttaccgaacgaggctgcgatggtgaagcgcgggctgatggcgttcagtttttcgtacgcgtaagccacgtcttccggctgggtgtacagcgcggaagcgtccatatggctgttgtccacgccatcttcttcaccgccggtgcagcccagttcgatttccagcgtcatgccgattttggccatgcgcttcaggtaggcgctgcagatctcgatgttttcttccagagattcttcagacagatcgatcatgtgggaagagaacagcggtttgccggtagcggcgaagtgcttctcgccggcgtccagcaggccgtccagccatggcagcagtttcttcgcgcagtggtcggtgtgcaggatcaccggcacgccgtagtgttcggccatctggtgaacgtggtgtgcgccggagatagcgcccagaatcgctgcgccctgaggcacatcggtcttcacgcctttgccggcgataaacgctgcgccgccgttggagaactgaacgatgaccggcgcgcgcactttagccgcggcttccagcactgcgttgatggagtcggtacccacgcagtttaccgctggcagcgcaaagttgttctctttagcaactgcgaagactttctgaacgtcatcacccgtgatgacacccggttttacgaaatcaaaaattttagacatgttactttgtcctgtttcgtcggccgtagatggatgtaaatcgatgttttcacgccgcgcagcgttagccgcgcggtataaaacaaacgggcggctttcgcctcccgttgtctgaattactgcttagcgcgctcttccagcatcacgactgcaggcagcggtttcccttcaacgaattccaggaatgcgccaccgccggtggagatgtaggagattttgtcagcgataccgaacagatcgatggctgccagagtgtcgccgccgccagcgatagagaaagcgtcgctatcggcgatcgcgcgggcgacaatttcggtgcccttacggaagttagggaactcgaatacgccaaccgggccattccacagaatggtcttggcgttcttcaggataacggccagacgctcggcagagacgtcgcccatatccagaatttgctcgttgtcctggatctcgctcgccggcttcacggtcgcggttgcggtttcggagaactcggtcgctacgcgcacatcggtcggcaccggaatgtcgcaggtttccagcagtttctgcgcgttcgggatcaggtcaggttcgtacagggactggcccacgttgttgccctgcgccgccacgaaggtgttggcgatgccgccgccgacgatcagctgatcggcgattttggacagagaatccagcacggtcagtttggtggagactttagaaccgcccacgatggcgaccatcggacgggccgggttgcccagcgctttgcccagcgcttccagttcggcggacagcagcgggccggcacaggcgacaggcgcgaacttgcccacgccgtgggtggaagcctgcgcgcggtgcgcggtgccgaatgcgtccatcacgtacacgtcgcacagcgccgcgtatttcttggacagggtttcgtcgtctttcttctcgcccttattgaagcggacgttttccagcaccaccagttcgccttcggcgacgtcgacgccatccagataatccttcgccagacgcactggggatttcagatggtctttcaggtagttgaccacaggcagcagggagaattcttcgttgtactcgccttcggtaggacgacccaggtgggaggttaccatcacgcgggcgccttgcttcagcgcagcttcgatagtcggcagggaagcgcggatacgcgcgtcggaagtcactttaccgtcttttaccggcacgttcagatcggagcggatcagtacgcgtttacccgccagatccagatcggtcatcttaattacagacatggtgaaccctctttattgaatctctataaaattgcctgagcagcgcgccaatcacgccggcgccgccgtactagaaaccgctggcagccattgcccgtgttgtatccaacatccgattggcaaagccccattcattgtcgcaccagaccaaggtctttatcaggtgctgcccgctgacccgggtctgcgtaccgtcgacgatagcgctgtgcgggtcatggttaaaatcgatcgagaccaatggtaattccgtgtagtcaactataccacgaaatgattcccgtgcggccttttgcaacagctggttgacctccgccaccttcaccgcggcgctcacgctgacgctcagatcgatagccgtcacgttgatggtcggcacgcgcaccgagatagcctcgaagcggtcgcaaaactgcgggaagatgcgggtgatgcccgcggccagcttggtatcgaccggaatgatcgactggctcgccgcgcgggtgcgccgcaaatccgcgtgatacgcgtcgatcaccggctgatcgttcatcgccgagtgaatggtggtcacggtgccggattcgatgctgtaggcgtcgtccagcagcttgatcaccggaataatgcagttggtggtgcacgaggcgttggacacgatgcgatgttccgccagcagcgtctgatggttgacgccgaacacgatggtggcgtccagatcgttgccgcccgggtgggcgaacagcactttcttcgcccccgccgccagatgggcttcgccatccgcccggctgccgtacacgccgctgcagtccagcaccacgtcgacgcccagctcgccccagggcaactgctccaccgccggctggtgcaacaggcgaatcgcgtcgtctccgacgctcagcgtgtcgcactcctgccgcacatcccaggcgaagcggccgtggctggaatcgtacttcagcagatgggccatgccttcggcgttcgccagctcgttgatcgccaccacggagatttccgcccgtcgtcccgattcgtacagtgcgcgcaatacgctgcggccgatgcggccaaagccgtttatcgctatgcggatggtcatgctgctcctgaaaaagggccgtccacgccgggtgactcaccggcgccgcccggcgctgactggttgtctcactaacccgcatagagtagtggatcgtaccgcccgctgtgaatcgccgagtttgcattattcccgcgcttcagcggtttttcaccgccgtcacatcggcatttctgttgaagagtgcttcaactgaaacgcttcagctgagcataaaccaaagttttggcaaaaggaacaggtgcaacagttcctcaggtaacggaggggagttttacgagcataagatgatctggcgcacatttttggcctcaagaccgcgacggattttcgctcgccggccccgtttcgccgtagtgctcacgaaaatagtcgcgcaaaaattcgaccgtcacccgcactttcgccgacgttgccagccgggaaacgtataccgcccagatattggccggctgataatactccggcaggatgtgcaccagcctgccgctgtcgatgttctctttcacgtcccaggcggaacgcagcgcgacgccctgcccgtccaggcaccactggtgcacgatttcgccgtggttcgacgccagcgcccccgtcaccttcaccgtctcttcgccgcccggcccctgcagccgccacagcccgaacgggtgatcgcgttccttgatcaccagacaggaacggcccgccagctcagccggatttttcggcacgccgtggcgctgcaggtacgccggcgaagcgcacaggatgcgctgattgtccgccagcttgcgcgcaatcaaattgggggcgatatcgtcgccgatgcggatatccagatcgaatccttcgctgaccagatccaccagccgatcggacacgtcgagccgcagttccagctgcgggtactgccgcgccagcgccgacagcgccggcgccacgaaacgccggccgaagccgaagctgctgaccacgcgcagcatgccctgcggcgcctggcgcacttcggacagttcgtccatcatctgatcgacatcgttgagaatgcgctgcgcccattcgtagatgcgttcgccgtcttcggtgatcgccacccgccgcgtggtgcggtgcagcaacgacacgtccagcgccttctccaacagcgcgatgcgcttgctgataaaggcaggcgaaacacccagctcttcggcggcggcggcgaacccggcgcggcgcgccaccagcacgaacacccgcaggtcactcaggatcggcatattgttcatgattcgtgttttatgtttcaccgttttcgcgattgattaacagttagtcaattataggataagagtattgtcaatctcccctacctacaaatgagacctctgtatgagcaaaacttacaagattgccgctatccccggggacggtatcggacgggaagtgttgccggaaggcatacgggtattgcaggcggcggcggcgcgctgggatctgtcgttggaattcgacaccttcgagtgggccagctgcgactactaccagcaccacggccagatgatgccggacgattggtttgagcagctcaagggcttcgacgccatctatttcggcgccgtcggctggccggacacggtgcccgaccacatttcgctgtggggttcactgcttaaatttcgccgcgacttcgagcaatacgtcaacctgcgcccggtgcgactgtttcccggcgtgccctgcccgctggcgaacaagcagccgggagacatcgatttctacgtggtgcgcgaaaataccgaaggggaatactcctcgctcggcggacggatgttcgaaggcaccgaacgcgagatggtgatccaggaatcggtgttcacccgtcagggcgtggaccgcatcctcaagtacgcctttgagctggcgcagcagcgctcgcgcaagcgtctgaccgccgccaccaagtccaacggcatggccatcagcatgccgtactgggatgagcgcgtggcggagatggcgcgccaataccctgatatcgcctgggataaacagcacatcgatattctgtgcgcgcgcttcgtgctgaaccccgaacgcttcgacgtggtggtggcttccaacctgttcggcgatatcctgtcggatctcggcccggcctgtaccggcaccatcggcatcgcgccgtcggccaacctgaacccggaacgcaacttcccgtcgctgttcgagccggtacacggctcggcgccggacattttcggcaaaaacatcgccaacccgatcgccatgatctggagcggcgcgatgatgctggacttcctcggcgacggcgatgcccgctaccgccaggcgcacgacggcatcctgcaggcgattgagcgcattatcgccgacgggccgcgcacgccggacatgcgcggcgacgcctccacccagcaagtcggccaggcgatcgccgccctgctgcaacgctgaacgccgcagattttcccgcgcagggcgcccttccgcgccctgctttgctacgtccgtttttccgcatcgatcgctgccgcaaatccgttgaaaatcaccgcagaaggcacgccaataccccggtcaagatcacaacaaattgtttacatactgtgttttatccttttacagatgccctaattgtggccctcctgtaatttgtgcacactcaaaaatgttaatgaagagtaaatattcccggcagcgttcagccggggcgtttgctcctcgcggtgtaacaaaacaaagggttcaaaccaataaggcccgggcgccccctacgctttgcgcaccggcccaccaccgataacaggagttcactcccatgcagagcaatcccaaaaaggatgtcacgctcatcgccatcagcctgtgcagcattgcgctgatcgccctttgcctgatgctctttccggcccaatccgcgcttatcgccaacaccattttcaacggcgtcacccggctgttcggttcaaccattcaaatcctggtgctgatcgccctgctggtggtgctgtatctggcgttgagcaaatacggcaacatccgcctcggcgaaggcaaaccgcaatactccacgctggcctggctgttcatgttcatctgcgccggcctgggctcgtccaccctgtactggggggtgatggaatgggcgtattattaccagacgccggggctgaacatcgcgccgcgcaccccaaaggcgctggaatacagcatcagctactccttcttccactggggcctgagcgcctgggcgacctacgccctcgcctcgctgatcatggcctaccacttccacgtgcgtaagaacaaagggctcagcctgtcggggatcattgccgccatcaccggcgtgcgtgccaacggcccgatcgggcggatggtggatctgattttcctggtcgccaccgtcggcgccctcaccatttcgctggtgctgaccgcctccacctttacccgcgggctgacggcgttgaccggcatcccggataacttcacggtacaggcgacggtgatcctgctggcggcagtgatcttctgtctcagctcttacatcggcatcgacggcggcatgcagcgcctgagcaaaatggtcggctggggcgccttcgccttcgccgggctggtgctgctggtcggccccaccgagttcaccatcaacaacaccatcaacgccatcggcctgacggcgcaaaacttcctgcagatgagcctgttcaccgacccgatgggcgacggcagcttcagccgcagctggacggtgttctactggctgtggtggatctcctataccccgggcgtggcgatgttcgtcacccgcgtctcgcgcggccgcaagattaaagaagtgatctgggcgctgctgctcggcagcaccctcggctgctggttcttcttcggttcgctggaaagctacgccatgcaccagttcatcagcgggcagctcaacgtgccggagatcctcagcacccagggcggcgaaaccgccgtgcagatgctgctgacggcgctgccgctcggcaagctgttcctggccgcctatctgttcatcatgatcattttcctggcctcgcacatggacgccgtggcctacaccatggccgccaccagcacccgcaacctgcaggaggggcaagatcccagcccgatgctgcgcctgttctggtgcgtagtgatcaccctgatcccgctgtcgatcctgtttaccggcgcctcgctggacaccatgaaaaccacggtgatcctgaccgcgctgccgttcctgctggtgctgctggtgaaaacctacggctttgcccgctggctgaaacaggactacgcggccatcccggcgcacctgatcgaaagcagcccaccggcgctgccagacgcgccgccggccgccgaactctccgctccatcgtcgtatcaaccgcgccctatggcgaaatgacaataagaaaagaggaaggttaacttatgagcactctgatccctgaatttaccttaccgaaagatttctgcgccgacgcccgcgaggcttacaccattccggcccggttctatacccaccaggcagcgttcgagcacgagaaagagcaggtgttcgccaccagttggatctgcgtggcgcaccgcagcgagctcgcccaaccgaacgactacatcacccgcgagatcatcggtgaaaacattctggtggtgcgcggccgcgacaaagtactgcgcgccttttacaacgtctgcccgcaccgcggccaccagctgctggcgggcgacggccgggcgaaaaacgtcatcacctgcccttatcacgcctgggcgttcaagctggacggcgaactggcgcacgcgcgcaactgcgaaaacgtgcagaacttcgataaggaaaactcgcatctggtgccggtgcgggtcgaagagtacgccgggtttatttacgtcaatctggactcgcaggccggcacggtggaagaccagctgccgggcctcggcgccaaagtgcgcgaggcctgcccgcaggtcgacgatctcaagctggcggcgcgcttcgtcacccgcaccccggccaactggaagaacatcgtcgacaactacctcgagtgctaccactgcggcccggcgcaccccggcttcgccgactcggtgcaggtcgaccgctactggcacaccctgcacggcaactggacgctgcagttcggctacgcccgcccttccgagcagtcgttcaagtttgaagagggtaaagaagccagcttccacggcatctggctgtggccgtgcaccatgttcaacatgccgccgctggaaggcatgatgacggtgatctatgagttcccggttgatgcggaaaccaccctgcagcactacgacatttacttcaccaacgccgatttgagcgacgaacagctcaaactgatcgactggtaccgcgacgtgttccgcccggaagatttgcggctggtggagagcgtgcaaaaaggcctcaaatcgcgcggctatcgcgggcaggggcgcatcatggccgacggcgctggcagcggcgtcagcgagcacggcatcgcccacttccacaacctgctggcgcaggtttatcaaccctgatgcgacggggcccaagggccccttcccctgacttgtgaggttctcgtgaatatttccgatcgggcgctattccgccaacaggcctacatcaacggccaatggcgcgacgccgacaaccaggaaaccctgccggtgagcgatcccgccaccggccaactcatcggcagcgtgcccaacatggcgacggccgaaacccaatcggcgatcgacgccgcccagcaggcgctggaaggctggcgcgcgctgccggcgcaacagcgcgcgcagctgctgcgccgctggttcgaactgatgctggaacaccagcaggatctggccagcctgatgacgctggagcaaggcaaaccgctggcggaatcgctgggcgaaatccgctacgccgcctcctttatcgaatggttcgccgaacaggccaagcgcaccaatggcgacatcatcccctcgccgagcagcgataaacgcctgatggtgctgaagcagggcatcggcgtgtgcgcggcgatcacgccctggaacttcccggcggcgatgatcacccgcaaggccgcaccggctctggcggccggctgtacgctggtggtcaaacccgccaacgaaaccccttattcggcgctggcgatggccgagttggccgagcgcgccggcattcccgccggggtgttcaacgtagtgaccggcaactcgcaggcgatcggcgccgagctgacccgccacccgcaggtgcgcaaactcagctttaccggctccacgccggtgggcaggctgctgatgcgccagagctcggacaccatcaagaaggtgtcgctggaactgggcggcaacgcgccgttcatcgtgtttgacgatgcagacatcgatgccgcggtggaaggcgcgctgatcgccaaataccgcaacgccgggcagacctgcgtgtgcgtcaaccggttctacatacagcgcggcgtttacgcccagttcgccgaaaaatttgtcgcccgggtagcggcgctgcaggtcggcaacggtttcgaaccgggcgtgcaaataggcccgctgatcaaccgcaaggcgcgcgacaaggtgctggagctgctcgatgatgcgctgagcaaaggcgcccaggtgctgaccggcgctacgccgcacacgctgggcggcaacttcttcaccccgacggtgctgggcgacgtacagcccggctcgctgctgctggaagaagagatcttcggcccggtcgcgccgctggtgatattcgatgacgaagccgaggcgatccgccaggccaacgacaccatctacggattggccgcctacttctacacccgcgatgcggcgcgcatctggcgcgtttcggagcggctggagtacggcatggtcggcatcaataccgggcttatctccaacgaggtggcgccgttcggcggagtgaaacagtcaggcctggggcgtgaaggctccgaatacggcatcgaagactatctggagctcaaatacctgtgccaggcggtataacttttttatgcgcggggacgcccgcgctttggagccaatgaatgaccagctatcagatgcttgatgttcgcgtcgtcgacatcgaaaccgtcaccgcacaggtcaagcgctttaccctggcggatccgcaaggccggccactgcccgccttcagcggcggcagccacatcatcgtgcaaatgcaggacggcgagcagcgctacagcaacgcctattcgctgctcagttcaccgttcgagctcgaccgttaccagatcgccgtgcgccgtgagtccccttccaaaggcggttccgacttcatgcacgatcggctggcgatcggtgatacgctgaccatcagcaccccgaataacctgttcgcgctggcgccggaagcgcaacatcacgtgctgatcgccggcggcatcggcatcacgccgtttatggcccatctgcatgagctgcaacgcagcggccaacgctaccatctgcactactgcttccacagtgaagagcacaacgccttccagcagcagctgatgcaagcgccgttcgcagacaacgtcagttgccatgtctccagccttggcggccggttggatctggcgcgcacgctggccgacgtggaacccggcgcccatatctacgtctgcggcccggcggcgctgaacgaagcggtctaccggatcgccgccgaacggggtatcgatgccgcgcgtttacacagcgaagcctttgccgccgaagacacggcgggcggcgcctttacgctggtgctggctcgatcgggtattgaacttgaagtgacggaagacatgaccatcctgcaggcgctggaaaacagcaaggcagccagggtcgagtgcctgtgccgcgaaggcatttgcggcacctgcgaaacccgcatcgtcgagggggaagccgaccaccgcgatcagtatctcagcgacgaagaacgcgcggcgcagcaaaccctgttgatttgctgctcgcgcgccaaaggcagccggctggtgctggatttgtaaaaggagcgcccgcatcggcgggcgtcctggttaggctttcgggaatatccacagatgctcggccggcagggagagccggcacagcgcccgatcgcgcgcctcgtggccataggcgcgcaccacgaagtcttcggccacggtgcggaacaggtattcccaacgatcgccgagatacatgctggtcaacaacggcagctcaagctggttgccctgcggatcttcgcccaactgcacgcgctccacgcggatcaccgccgtgccctcctgcccgacctgcacgccggcgcccgctttgccccacagcgcccaatccttgccttcgatgcgcgcccggtcgccttccagcgccacgatcttgcccggcaagcggttgttgctgcccatgaactcggcggtgaacagcgtggtgggcgagccgtacatctcctgcggcgtgccctgttgttcgattttgccgttattgagcagcaggatgcgatcggaaatggccatcgcctcgttctgatcgtgagtcaccatcagcgccgacagaccgagcttgatgatcagctcgcgcaggaatacccgcgcctcttcgcgcagcttggcgtcgaggttggacagcggctcatccagcaggatcaccggcgggttgtagaccagcgcacgcccgatcgccacgcgctgctgctggccgccggaaagctggtgcgggtgccgcttggccagatgccccaacccgagctgatccagtaccgcctgcactcgctgggcgatttccgccgagccggtcttacgcagcttcagcgggtaagcgacgttctcaaacaccgttttatgcggccacagggcataggactgaaacaccagccccaggttgcgctcttcggcgggaatttcgctgcgcgcgctgccgttgtacaccgcgctgttgccgatgacgatccgcccctggctcggtttctccagcccggccaccgcccgcagcagcgtggttttgccactgcccgacgggcccagcagcgagaccacttcgccccgtttcagatccatcgacacccctttcagcaccgggttgtcgccataggtcaaatgcagattctctaccgaaagttcaatcatgtaatttcactccaaagcgcaaggcgatccccagccccagcaccaccagcagaatattgatgaacgacagcgcggcgacgatatcgatagcgcccgcggcccacagagaaaccagcatcgagccgatggtttccgtgcccggagacagcagatacaccccggtggaatattcgcgttcaaaaatcaggaacatcagcagccaggagccgatcaggccatagcgcgacagcggaatggtgacgtggcgggtgatctggccgcggctggcgccggcgctgcgcgccgcctcttccagctccggccccacctgcagcaacgtggaagagatcagccgcaggccgtaggccatccacaccacggtgtaggccagccagacgctgaatatggtgctgcgcagcgaacgcagccagacaatccagttagcacgcagccattcggccatcggcaacgccgacagccagccttccttgagcgatttgtccagccacatcggcaggaacaggaacacccacaggaatgccagaccggccagcagccccggcaccgcgcgcggcaccagcacgctgtagtcgaggaagcgagtggcgccatccggcttgcggtgcatcgcgatgccgataaacaggtagcacgccaccgccagcgccccgccgatcaccccgatcgccatcgagttgacgatggcgcgcagcaggttgggctgcgcccagatggtgcgaaaggtgttgatcgacagttcgtcccagacagacacgcccacgccccagttggagataaaggcgcgcagcaccacgccgatcagcggcacgccgatggtcactgtcagccagaacaccaccaccgcgccggccacccagcgccatttacccagcggcagcgcgcgggcctgcgaggctttgcccttgacggtgacaaagcggttggcggtgcgcatcagccggcgctgcagcatcaccaacggaatagtgatgcaaatcagcaccaccgccaccgccgccatcagatggtaagacggcgtgcccagcttgttggtcaactggtacaggtaggtcgccagcaccaggttgccttccggatcgcccagcaccagcatcaggccgaacacttccagcccgaggaagaacagcagcaccccggcgtacaagatagacggccgcaccatcggcagactgacggcggtcatcacctgcagcggcgtggcgccggcggtgcgcgccgcttcttcaacgtcggagcccacgctgcgcagcgccgaggagatgtacagatacgcgtggggcacgtgcgtcaatccggctatcaccacgatgctggccattgagtagatgttccacggcacgaagcccagcagcgcctccgcccacagcgagaagaagcctaccggccccgccgccaccacgtaaccgaaacccagcaccatcggcgacacgaagatcggcaccagaatcagcggttcgatgattcgccgccccggcagatcggtgcgcaccatcaggaaggccaaaataccgccgagcgggatggcgataatcaccaggccgaatgccagaataaaaccgcttttcagcgccttgtagaaatccgggtcggtaaagatgaactcgaaggcctcaaggctgaagaccttggaaggagagaaaaacggtgccgagaggaagctttgaatgatgataaacgacagggggacatagataaccagcgcggttatcaacaccaccaggccgcgcggcaggctctgccactttctgcgccatgcttgcataaatgctccctatggttgtaaacgacgaccaaagggcgcgcgcccgtgcgacaggcgcgcgtccgaatgcagtccctgttatttcgccgcggcggcgcgccattgtttgatgtagtcgagacgcttggccggctgcagatattccagcaggctgtcatcgaccgggatcggcttgagcgcgttacccaacagcttggtcatgccatcgatgtcgttcttgccttcgatgtcgttgcggatcgaggggatatccgcctgattggcgagaatattttgccctttctccgacagcacgtagtcgaaccacagcttggcggcgttagggttgccggcctctttgctgatgaagctcacgcgcgacagcaccagggtgtagtctttcggatagacaatgccgagcgacgggtcgctcttggcgcgagcctcggcgtacgaaccgaggatattgaagccgatcaggttttcaccggaggaaacgcgttccatcatggtgccggtggaggattgcaccgccaacccgcccttggccacatcggccagcgttttgaagtagttaggatcggccttgaagtcctgcaccgacagcatgaagccgacgccggatttttcgatgtcgtaggtggtgactttcttcttgaatttgtccgtctggccggcgataagcttggccagcgccgcatgcgaatccggcacatcgccttgcgggatcaggcgtttgttatagataaacaccaccggctcgtaggtggtgccatacaccttctcttgccataccgcccatttcggcagctgagcctgctcgggggaggcatattcctgcgcgtaatcgcccgccagtttcaaaatggtgtccatcgacgagctccacaccacgtcgccgctggtgccgccggccgcctgctcgctgataaagcggttatacagttcggtgctgttcatgtcgttgtattcgaccttgatgcccggatacaacgcctcaaacccctggatcaacggcgccgccgccttggtgtcggtggtcgagtaaatcaccaccttgccttctttcttcgcgccgtcgaccagtttctgatagtcggcggggtagcccgccgggaaggccgcataggcggaaacggagcccagcaaggtgattgccgctacggtcgcgctgatttttttcatcatcatcatccatcccctgatcacatttaataaaccaaaaattaacatatagttaataactgtgacgaggcaacggcgttgctttgttatctttcggttttgtgaggttggacgtttttcagccaataaaaagcccggcagcgcgggctttacggcgcttccagtcgcaaactattcggccaggcgagaacgccgcagcaggcgaattcgctgtacgatggcgacccccagcagggtcagggcaaaccccgccaactgcaccagcgacagcgcctcgccaaacagcgcataagcctgcagcgctgccgccggcggcaccagcagcatcagcgcggtaatgcgagtcaaatcgccgtggcgcaccatccagatgaacagcgcggtgccgcccagcgacaacacgccggccgaccacagcagcgagaaccacagcgtcggcgaattgtcccaggcgccggagcccatcacggccgccaacgcgccggtcacgatcgccgcgccgaggtgctgaatggcgcccgccgcccgcagatcggccgccgccagcgaagacttctgcaccatgatgccgatcgtcagcgcgacgatgctgccaaaccccatcaggatcggcaacagcgccatattgccgacatcaatgccggtcagccggggagaaagcaccagcgcaacgccgataaagccgatcgccagcccggcccaggagcgcaaccctatcgatttgcgcagcaccaacgcgaaaatcagcgcggtgaacagcggctgcaagccgccgatcagcgacatcaccccggccgccaggccgttcgctaccgcccaccagcttgcagcgagataaacgccattcatcaacatgccggtcagcaggtgcatcacgaactgccgccccttgggccaggcgcaatgcaatgccagcaaagcgaataccgcggcggcgatcaaaaagcgaaaggtcaggaaaaggttgggatcggcatgatccgccaccgcccgcgcggcaataaaacccgtcgaccaaattaatatcaggaaaaacggcgcgataaatgcctttcgccgatcgcgtttttcacgcggggttatttccatatcactacctgaaagaatgcggttgatgaatgaaggcatactaaccaatttaacacgggcttaacagtgccgagcggacgcccaagttcagatggtgcacataattaccggtgaataatgaagtttcaatttcatataattcatcaagcttataattaattacgctacgttacgacaatgtaaattaattgctacatcgggtataaatattcccctcttggcgacattgtcgggataattcccctttgctagcctttctgaagccatttaattaacgggactgactcatggccgaaatcactgattttatgaaactggatatgcgtattggcgaaattatttccgtggaatataacgacaaggcgttaaaacccgcctataagctgcgcattgatttcggcgaggaaattggcattaaaaacagctcggcacaattatgcgaaaactatcaggaagatgacctgcttggcagaaaagtcatctccgtcgttaatttccccgccaggcgggttgccggatttaaatccgaagtgctggttcttgccgcggtcaccagggatcaaggcaccgtcttgctgaaacccgatttcgacgtggagatcggcagcaagattttataaccgccccatcattcgtgaggccaccgagaaatgcgacagttatctctgcttgatgaagttaagaaggcataccaggaacaccgttcagcctttatccccggcgctaccatgcaggcaatcctgctggcgctgggcgcgcggccggaagatttcgccaggctgcagcaggtcagcgccaatctggcggatgatcccacgctgcctttccgcaagtccagaaacggccgcttctgtttcgacttcgatcgcgcccggattgagcggctggagttccagcctttcgtgctctcggtcgaggaagacttcatccgctacgattcaggaaaggtgcgccatttccgcggcatcaacgacgatctgcagttgaatacggcctttcaggcgctgatgaaattcaaagcctacgtgatcgatggcgtgggcgtgacgccgcgcccccggcttaatcagaagatcaacaagttcgtctgcaccgtattcaacctgcgcaccgtcaccacgccgcagatgctgggcgaaccggcgctggaaggtgtgcacagcgacggcgtcgaccacaccatgacaaccttcctcggctgcgacaacatgaccgacgacagcgccaagacctttattcacgatatgcgcgaaaccagcgggatcaaattcgatcgggcccggccggaatggattttgggcgaaatacagcatcggcatttcctcgacaccctgctgattgtcgaccacgagcgcaaacacagcctctctccggtaaaagcgcaggacaaacgtaaggattcaacccgcgatatgctgatctttttcacccgcaaaccggtcgaagacggccacgtctctttcgcgtacgactcttttaaaccgcatatcgaaatcccgctgtcgatagacatggtggcgcgtgcgagctaacgcgctgccgggccggccgccatgatccctctgtgcggccggttcacgccaggataaacagcgctggattaatcaggtttttgtcgccgaattattatatcctgccggacgaaaatttttgcgggcgctcgctgccccacgcgccagccctctgcaggcgggccgtttatttcatgaaaacaggcagtgccataccgttatgaccaagagtttatccccgaaagacattatcgccctgggctttatgacctttgccctgtttgtcggcgccggcaacatcattttcccgccgctggtggggctgcagtccggcgaacatctgtggccggccgccctcgggtttatggtgaccgccgtcgccctgccggtgatcgccgtgatcgcgttggcgcgcgtcggcggcagcatcagcctgcttaccggccctatcggccgcaccgccggcctgctgctggcgaccgtctgctatctggcgctcggcccgctgttcgccacgccgcgaaccgccaatgtctctttcgccctcggcattgcgcctttcaccggcgacggcgccctgccgcagttcatctacagcctgctgttctttaccctggcgatgattgtgtcgctgtatcccggacggttgctcgataacgtcggccatattctggcgccgctgaaaattctggcgctggccgcgctcggcatcgccgccctgatctggcccgcaggcgcgccgctctccgccgtcggcagctatcaggcctcggcgttttccaccggcttcgtacagggttatcaaaccatggacacgctgtcggcgctgatgttcggttcgattatcgttaccgccgcccgctcgcgcggcgtcagcgacagcgggttgctgctgcgctacaccctgtgggccagcctgatcgccggcgtcggcctgacgctggtctatatctgcatgttcaaactcggcgccggcagcggcagcctgatcgagaatggcgctcaggatggcgcggcaatcctgcacgcctatgtacagcacaccttcggcgatctgggcagcgtctttatggcggtgctgatgttcatcgcctgcctggtaacggcggttggcatgacctgcgcctgcgcagactttttctcacgctacctgccgctctcttatcgcgcgctggtggtcatcctcgccctcttcgccatgctggtttccaacatggggctggccaatctgatccgcgtctcactgccggtgctgacggcgatctacccgccctgcatcgcgctggtgttgctcagcttcagccagaaccgctggcgcagcgccaggcgcgtctttgcgccagtgatcgccaccagcctggtgtttggcctcgccgacggcctgaaggcttccagcttcagcggcctgctgcccgcctggttcgataagctgccgctggccgaacaggggctggtctggctgcagcctacgctgctggtgctgttgctggcggcggcttatgaccgtgtgcgcggcgtcgaaagcgccaacgccgcgtcgtaagcgcgatttccgcccataaaaaaagccggtcatgatgaccggcttttttatcggcttgcgcccggcggcttacttcagcaacgcctgcgccttcgccaccacgttgtccacggtgaagccgaactcggcgaacagctgctccgccggcgccgactcaccgaaggtggtcatgcccacgatggcgccgttcagccccacgtacttgtaccagtagtccgcgatacccgcttccaccgccacgcgcgccgtcaccgccgccggcagcaccgactcgcggtacgccgcatcctgcttgtcgaacgcgtcggtcgacggcatcgacaccacgcgcaccttgcggcccgccgcggtcagtttgtccgccgcttccaccgtgatgcccacttcggagccggtggcaatcaggatgacgtccggcgtgcccgcgcagtctttcagcacgtagccgccgcggtacacgttcgccagctgctctgcggtgcgcggctgctgggtcaggttctggcgcgagaacaccagcgtggtcgggccgtcgttacgctcgatgccgtactgccacgccaccgccgattccacctggtcgcacgggcgccaggtgctcatgttcggggtcacgcgcaggctcgccagctgctccaccggctggtgggtcgggccgtcttcgcccagaccgatggagtcgtgggtgtagacgaacacattgcgcagcttcatcagcgccgccatgcgcaccgcgttgcgggcgtattccacgaacatcaggaaggtcgccgagtacggcaggaaaccgccgtgcagcgcgatgccgttggtgatggcggtcatgccgaactcgcgcacgccgtaatgaatgtagttgcccgccgggtcaacgttcagcgctttcgagccggaccacatggtcaggttgctcggcgccaggtcggcggagccgcccaggaactccggcagcaccttgccgaacgcttccagcgcgttctgcgacgccttgcggctggcgatgttggccgggttggcctgcagtttttccacgaacgccttggcgtcggctttccagtccgccggcagctcgccgttcatgcggcgcttgaactcggcggccagttccgggaaggcccgggcgtaggcggcgaacttgtcgttccaggccgcttctttggcctgaccggcttctttggcgtcccactgggcgtagatgtcctgcgggatttcaaaggcggcgtatttccagcccagtgcttcgcgggtggcggccacttcggcggcgcccagcgcggcgccgtgcacgtcatgggtgccggccttgttcggcgaaccaaagccgataacggtcttgcacatcagcagcgacggcttgtcggtcacctggcgggcttcttcaatcgcggccttgatggcgtccgggttgtggccgtcgacgttgcgcaccacgtgccagccgtaggcttcgaagcgcagggcggtgtcgtcggtgaaccagccgtcaacgtggccgtcgatggagatgccgttgtcatcgtagaaggcggtcagcttgccgagcttgagggtgccggccagagagcagacttcgtgcgagatgccttccatcatgcagccgtcgcccatgaaggcgtaggtgtggtggtcgacaatgtcatggccagggcggttgaactgcgccgccagggtgcgttcggcgatggcgaagccgacggcgttggcgatgccctggcctagcgggccggtggtggtttcaacgcccggagtgtagccgtactccgggtggcccggggttttggaatgcagctgacggaagttttccagctcgcgcatcggcaggtcgtagccggtgaggtgcaggaggctgtaaatcaacatggagccgtggccgttggagagcacgaaacggtcgcggtcagcccagtgcgggttagtcgggttgtggttgaggtagtcacgccacaggacttcggcgatgtccgccatgcccataggggcccccgggtggccggaatttgctttttgtacggcgtccatgctgagtgcgcggatagcgttggcaagctctttacgagaggacatgttttactccaggtcggataaaaaaagcagtcaagttccctattttctcagactccacatcacaacggcaatccctaatgccaaatgagagcgagttcaccacttattagcacgattggacgctttttcggaataacactattctcgctccggctggcgtacactaggctcttgcgacacgatttcctccaggcaaaatgactcttttaccttgttaccttcacaggaagatggcgttatgaaaattcgtacctctttgattgcgttgggcattgccaccctggcaaccggctgtcaaaacctgaataccgaaaccctgatgcagtccggcgcgcaggcgttccaggcggcgaccctgagcaacaacgacgttaaggccctgagtgataaatcctgcgccgagatggacagcaaggcacaaatcgcgccggccgacagcacctatgccaagcgcctcaacaaaatcgctgcggcactgggcgacaacatcaacggcaccccggccaactacaaggtctacgtgaccaaagacgtcaacgcctgggcgatggccaacggctgcattcgcgtctacagcggcctgatggacatcatgaacgacaacgaagtggaaggcgtgctgggccacgaaatgggccacgtggcgctgggccacacccgtaaagcgatgcaggtggcttacggcaccgtggcgctgcgcaccgcggcgtcctccgccggcggcgtcatcggctcgctgtcgcaatcgcagctggcggatatcggcgagaagctggtcagcgcccagttctcgcagaagcaggaaagcgaagcggatgattactcgttcgatctgctgaaaaaacgcggtatcgatccgaacggcctggccaccagcttcgaaaaactggcccaaatggaagccggtcgtcagagcagcatgttcgacgatcacccgtcttcccaagcgcgcgcacagcacattcgcgatcgcatcgcggcagagaaataaccacgagaacgcccggcaatcgccgggcgttttttatcgtctcaatacagcgttttctgcggcggcccggcgaaggtcagcggcccgacctgcttcatgtccacctcgaccaccgacggccccgggtaattgatcgcctcggccagcacgccgttgaactgcgacgccgcgtccaccttccaggctttcaaccccatcgcttcggcgatctgggtaaaggccggcgtatgcagctcgttgtaatactggcgcccggcgaaatacttgtcctgaatgccacgcattacgccataaccgccatcgttcatgatcagcagagtgatgttcacctgttcctgcgccatggtcgccagttcccccaggcccagcgccaaaccgccatcgcccaccagccccaccaccttgcgctgcgggttggcaatcgcggtgccaatcgccatcggcagccccatgccgatagcgccggccagcgagtgaatgttgcacagcggcgagatcgcacggaacagacggctgccccagacgctgccggaaacggtgatatcgcgcaccaacagcccgtcctggggcagtgcggcgtcgatggcgtcattgagtttggcgtattcaccggactgctggcgcagcgcgctctccgcctgctgcaccgcccccgcgatttcggcatcccactcggcgttgaccttttcgccgggggccaaccgcgccgccagcgcggccagcagcgccacacagtcgccgttgatctgctcatcggccaggtagttgcggttggccgccgccggatcgatgtcaatctgcaccagcgggcgcggcagcggcagcgtccaggtacgggtttcattactgcgcaggcgcgaaccggccaccagcgtcagatcgcactgcgtcaggatcgcttcgatgctcggtgagttatggaacgcccgcaggctgcgcggatggctgtccggcagaatgccgcgtccgtgggtgctggagatcaccgccacgccggcgtccgccagcttgcgcaccgcgtcgccgcaggccaaggcgccgccgcctaaccaaagcagcggacgcttggcctgtttcagccgctgatgcagccgttccaccgccgcatcgtccgccttcggcagcggcgccggcgccaacggctcggtcagcaccgagcgggacaccaggctgctttgaatatcgatcgggatctcgaccgccaccgggccgcagggcacggtttgcgcatccaggatcgctcgctggatcactgccaccgcctgctccggcgaattgacacggtaagcgcgcttggagcaggcgcgcaggaagccgagctgatcgcgggtttcatgaataaaaccggcgtcggcgtccagataggttttttccacctggccggtgatatgcaacagcggcgtgttggcgttgagcgcctcaatcatcgcccccaccgcgttgccggcgccggcgccggtgctggtcaacgctacgcccaggccggagaagcgcccgtgcgcgtcggccatggtgaccgcccccgcttcgccgcgcgccggcacgaagcgaattttatcgcgctgccccaccgcatcggcgatcggcagattatgaatcgaaatgatgccgtacatcgccgacaccgcgtactgttccagagtccgggctatcgcctcgccaaccgtgattttatcgctcatcatctgccttcttagggtaatcgttattagggttatgcgtagaggtgtcggcctagtcgctccagcggttcacctgatggctcagcgccagatacacgcttttctgctgcatgtaggccttgatgccgttcaggcccttttcgcggcccaacccgctctccttgaaaccgccgaacggcgtggaaatcgagaacgttttgtaggtattgacccagacggtgccggtttccagccgctccgccagcgccatcgtgcgagggaagtcgcggctccagatgccggccgccaggccatacaccgagtcgttggcctgttcgatcagctgttgctcgtcgtcgaacggcagcgccaccagcaccgggccgaagatctcttcctggcaaacgcgggcgtcgttgttcaagccttcaataatggtcggcaggtaatagctgccgctcgccagttgcggatcggccggcgcttcgccgccgatgaccacccggccgccctcctgccgcgccagcgccacgtagtccgccacgctttgccgatgtttggcgctgatcagcgggccaagatgcacgcccggcaccagcgggttgccgatacgcagccccgccgtcagttcggtcaagcgcgccagcagcggctgatacagcgaacggtgtacgaacaggcgcgagccggcgatgcacgcctggccggcggagctgaaaatgccgtagcagatgccgcgcgccgcctgttccagatcggcgtcctccagcacgatggtcggcgatttgccccccagctccagcgaggtggggatcagcttatcggcggcgatatgcgccaaatggcgcccggtgctggtcccgccggtaaaggaaatcttcttcaccagcggatggcgcgccaacgcctcgccgatcaccgaacctttgcccggcaacacgctgagcagcccggccggcagtcccgcctgttcgaacagctcggccagcttcagcgccatcagcggcgtggcttcggccggtttgagcaccaccgcgttgcccgccgccagcgccggcgccaccttctgcatttcgctggcgatcggtgagttccacggcgtaatggcggcgatcactcccatcggttgatactggctgagggtcatcacctcggcgctgcgcggggtcggcagctcgccttccaacacctcgcaggcggcggcgaaatagcgcgcggtcgccgccgcgctggccaccaggccgcgggtttccgccagcggtttgccgttgtcgcgagtctgtagctcggccagctgttcctgctgcgccaggatcaggttgctgacgcggtagagaatcgaggcgcgttggtgcggcaccagtccgcgccactccggcgcgcgccaggcgcgttccgccgcttccaccgcctcgttcacgtcctcgacgttagcggcgcgcagccgcgcgttgacgctgccatcggccgggaataccgaagccatctcttcgccacgcccttcacgccagcgcccggcgacaaaaatattcaatcgttccatgctccgctcctgccgttcaggcaataaaaccgccgtccaccagacggcggcaggcttgtaccgcgctcagcgccgccagggttgatgttttgggattgctcgccagcgggttaccgctcagctcaatgtgaaactcgccaaagtcgccgcacacctgcaggcgatgggtattgcgccgggtggcgggatcgacctgcaggcgcacccgggtggcgtccatccccagaccgttgagcgcaatagtggccgccacgttggcattggccgggaacaaacgcgccgcttcgcgcgccgagccttcaaaaaatacctgcgcctcgcgcaccgcatcgaggtcgatcagttgctccgccgggctgccgcgccagctggccgggctcttgctggcctgataggtcacgctctccaacccgccttcacgcgccgacgccagcccgtccatccccgccaccgcgccggacagcacgatcagttgcccgtgatggctgcggcaaacctgctgcagccgctgttgcaatgcggcgtccgccagcgcgccggtcgagatcaccgccagcggccaaccgcgctgcagcaccgcctcgccaaactccgccaccgcctgctggctggcgcactccagcaccaaatccggccgctgcgaacactgctccggatgggtcagcgcctgcacccgcccgccgaaggcctcggcgatcgccgcatgatgagctgcgcgcgccaggatccaaccgacctccacgccttccggcagacgggcgatcacttccttcgccattgcgccgtagccaatcatcatgatcttcttcatctttctcggcccctgctacacatggcggttaaagccgccggaaacgtccagcgccgcgccggtggtaaaggaagccagcggcgaagcgaggaacaacagcgcctgcgccggctcctgcggcttgccgaggcgtttcatcgggatgccgcggcgttcggcgatcgccgccgtccactgctcccagctttgatctttatcgctgcgatcgtcgaaacggcggcgccactggcccgactccaccatccccagcaagatcgagttaacgcgaatgcctttgcccaccagctctttcgacagcgtcagcgtcatgttgagcagcgcggcacgcgccgccgaggtggcgatcatgtgctcttccggctgcagcgccagcagcgagttgacgcaggtgatagacgcgatcgccgatcgttccagcgccggtaagaacgcctgcaccgggttgatcacgccgaacagcttcagctcggcctcatgcagccaggcctcgcgcggcgtctggtcaaaatgggcgacgaagccctgaccggcgttgttgatcagcagatccacgccgccgaaatgcgccgtcacctgagcggcgaactgcgccacctgctgcgcgtccagtacgtcacagcgcagcgccaggatatccgcctgcgggaagtccgcgcgcaggctggctgctgcgccggccagtttgtccggatcgcggccgcagaacgccactttcgccccttcggccagcagcagcttcagggtttcgaaaccgatgcccgacgagccgccggtcaccaccgccacccgatcctcaagctgaaaattcatcgttggattgctcccgtaaagtcccgcagatagcggttgaaacacgccggcgcatcgaggtagctggcatgaccggcggcggcgatcagacgcagcgccgcgtcctgttcacccgccagctcggctgccttctccggtggcgtaatgcgatcctgttcgccgcaccacacctccagcgggccgcgatagcgcgccagatagcggccgatatcatcgttagccagcatccaggcggcactcagaaaaccgtcgggatcgagctgctgcatgccgttgcgcacccaggcgatatcctgcggatccgccccttcacgcagcaaggccgccgcccgctgctcgccgtagcccaccggccccagcgtctctatcatctgctggcgctggccgtacacctgccgacgcttttcctccggcgccgtggcatagccctgcgccggatccgccaacaccagcccacacagcccatccggatagccggcggcataggcgctgccgatcagcgcccccagcgaatggccgacgatcagcggctgcaccagctgcagctcatcaatcagcgccgccaacgccgccgcataaccggcggcatcggcctgcggatccgccaacggcaggctgccgccgtagcccggcgcgtcccatgccaccagacggtggccgtccgtcaggccgttatcgttgaactgcttgatccacgaggcggatccggagctgatgccatgcagcaacaccaccggccgcccctgcccggcctcgcgccagctcagggtgtacgccccgcagcgcgcccgttggcgttgcgccaggccgttcatcagttgcgcttcactttggacagcgggtgatccgccggataggtcgggatctccggcttggcggtgccgagcatcacgcacatcagcgcctcttcctcgccgtggttgaacaggccgcgatacacccccgccggcaccgagatcagatcgcgctctttcagcctggtttcgtaatactcttcgccatcctgaatcatcagcgtgatgctgcctttcagcatgaagaacacttcttccacgtcatcatgcaggtgcagcgggccctcgcacttcgaaggcagcaccatggtggagaaggtgaagttgcctgccggaatggtgttggcatcgctggccacgccggtggcgccggtgccgatgtagcgcatctgcgcacggcggtatttcgggtcgaagtcggcctggaatttcagcgcgttccagtcatatttgcggccctcgaaacgggcgatgcgcgactccacccagttttccatcgacagatcctgcggcttgacgccggctttgttctcaacctgagacatgttgtcactcctctgttgaatcgattgattaatcagtactttctcagcaacggcagcagaatgaggcagccgacgaaagccatcaccaccaggaacagcaggccgttatccatattgccggtggcggcgatcagcgcccccatcagcaccggcgccagcgcaccggcaaaattgcccaatccgttgaagatgccgccggcggtggcgctcaccttgctgctggtggccttcgccaacagcgcgaaaatattcggcgcgccggcgccccacataaaggtgctgaaggccatggcggcgatcacgctgtaggtgccctgcaggtgcaacaccaccgccagaccgaggccggcgccgcacagcgacaggaagcaggccagcgcgcggcgatccagcttgtccgacagccaggcgcccagcacttcgccgagcagcatggcgatgaacggcagcgaagagaggtaaccggcatgttccagatgaatgcctttgcccttgatcagatagctcggcagccagccgttcatgccccacaggtaggtcaggaaggcgatgttgaacaggcaaatcatccagaaatgcgggctgcgcaacagctcgcggcggtgctgtttgcgttcggacaccgccggtttggccgccgccgccggacgcgcgacgttcaggtggcgcatgccgaacagcaccagcaacatcaccggcagtgtcagaaacgccataaagaagaaggtggcctgccagtcgaaggtattgagaatgtacagggtgaccgggaagccgagcgcggcacccagcggcgtgccgagcaaccacagcatggtggcgcgcgcctgcagctgcggcgggaaagcctgacgaataatggcgtaggccatcggcagcagcggcccttcggcgatgccgagcagaatgcgcagcgtcatcatggcgtgataggaacgcaccagccccatcaacaccatcagcacgccccacaccaccatcatgccaatcaataccttgaccggattaagccgatcgccgatgccgctgagcagcatggaggaaatgccgtaggagaacagaaacgcgctcatcagcaagcccagccgcgccgggtcaaaaccgatgcccaacgcctgctgaaactcggcgtcggaaaacagcgccgcgatgctgatcttgtcgaaaaacgccagcagcacgcaggcaaacagcgcgatcggcaccgaccagcgcacccgctgctgcggattttcggcaacggtttcccccgcccgtccagcgcgggcgtcaatgtcttgcgtagtcataaaacgctcccgaggttcgggcgttatttcaacgccatcaaagaaaactccgcatccgccagttgctgcggatccagcacccggccactcgccaaccaacgcttgccgagcttgatggtacgcgcgtcgttgaacgccaccatctgcaccagctgccgatcggcgttcagcgtgaagaacacctgcgactgcggcgtgcggcgcaccacatggtgcacaccgccgctcggcacgccgaggatctggatattgacgtcatattgatccgaccacagccaggccacgtcgtcatacggggcggcgaaggcgtcgagcatcgcgcaggcggtgctgatggcctggttttgcgcgtaggcccaggactgcaggcacaggccaagcgtcgggtgacgcgccacatcgcccgcggcgaagatcgccggatggctggtgcgcccctggccgtcgaccacaatgccggactcgatcgccagcccggcgctgcgcgccagttcgagattcagctcgacgccgatccccaccactaccagatcgaagacctgcggatcgctgacttcgctgccgatccaggcggcgccgtcgcgatcttccagcgagatctcgccgcagccgcacagcaccgtgacgccctgctggcgatgcagttcgagcaacgcctgtgagacatcggcgccgacgctgcgcatgcacagcgcaggctggcgttcaaacaccgtcacctcggcgccgagacgccgcgcggaagcggcgatctccagcccgatccaaccgccgccgacgatagccaggcgacggcagccctgcagcccctgccgcaaccgggccgcatcgtcccaggaacgcagcgtcatcacgcgcgggtgctgcgcccaggcagcgctcggcaaacgcggccgcccgccggtggcgatcagcaactgctcgaactgcagccgttgcccgtcgctgagcgtaacgatttgctgttcagcgtcgatggattcggcgcgcagcgggcggcgccagtcgatattcagctccgccaccgtctgttcgctgaacagccggctgaggggcaccgcggcatccagcagcgccgctttcgacagcggcggccgctcgtaaaaatcgtagggttcgtcgctgacaaccgtcagccggccgctgtaaccccggtcgcgcagcgtcttggccgcccaaccgccggcctggccgccgccgatgatgacgatgcccgcctgctccggccggttcataacgcctccgcctttttatgctggcggcgcgtgtcgtgatcgatgccgccctctaccgcccattcggtgaaggagaccagcgaatgttccagctcgcgcggctgccagttttccgtcagataatcgtcgttggtgtagtactcgaacgcgccgccggtcgggctgttgacgtaccagaaataggccgaggagatcgggtgacggccggggccgataaaggtgctccactgctctttgttcatggcaatgccgccgccgatcacttcgtggatatcgcgcacggtgaacgccacgtggttcaggccgcgtgggcggttcggcagcttcagcaggaacaggttatggtggccgccgcgcgcctgggtgcgcaggaagacggcgcgatcgatatagcgatcggaaacctggaaatccaacagctcgcggtagaaacgctcggtcgccgccagatcttcaacgaagaacaccacgtggccaatgttgatcggctgcgcctgcgaatagaccgggctgggttgatcgatgcggcgcacgtcgccccattggttgatcggcgtgaccggcacctcgaccgcctgctggcggctgacgacgaagcgcagcgtcatgccgttgggatcgaggcactccagctcttctcccacctggcggaagccgggcatcagcgccaaacgcggctgcaggcgcgccagatcggcgggcgaggccacgccccaggtcatgcggcgcagggtggaaccgccttcaaacgccgcaggcagcgccgcgctttgcagcggatgcaggacaacccgcgccccgctcagggtagtgaattcgcgcagcgcttcgccccaatgttgcgtggcgggctgcaggccgaagtcttgcatgaatttttcgcaggttggcagatcttcgacgccaaattccagtttttcgattccgattacgctcattgttcagcctcacgttctcgctgcatacggttttcaggcatgagtgaaccccggcccctgtttgctacgggccttgtccctgcctgagtaaaagagtcggtcctgtcggttagccgacgttggcctgcggcggcgcgccgaggaagccggaaattttctccgccgcgtcgcgcacttccatgcgcagccgctcgcgatccgctttcgggatctcatcggacggcaccatgatgctgaccaccgcctcgacccgctgctcgcggttgaagatcgggtagacgatcgaggagatgccgtggcggaagaacgattcgccgatcacatagccgcgcgccttgtcttgctgcaccatctgccacagcgtttcgcgatccgccggggtgcccggcgcattgcccggcagctgcgcgtctggatacagttgttcgaactcgctgcgagtcgcgctggtcaacaacatgcggccgagcgaggtttggtgcaccggcaagcgggtgccgacgctgacttgattgatctgcgaaccggcggcgctgacgcgggcgatatagatcacgtcacgcccgtcgcggatcgccagatggctgctgcactggctgcgatcgcgcagctgctcgatcaccggctggccggcctgcgccacgtccagcgacgcgatatattcgaagccgagacgcagcaccttgatgccgagcgcaaaggtgttggtgcgcggattgcgctccagaaagccgaggtgttcgagcgtctgcaccacgcgataagcggtggccttcggcatatcgaccaggcgatgcaactcggcgaaggtcatctccttatgctgctcgccaaacgccagcagcaactgcaacccgcgatccagccccgggatcagatatttacatgcttgctcgtccgccatctctcgctcctgcgctgtgcgcctgccctgcgggccgtcagttgaatacgaagccgccgttgaccggcagcagttgaccggtgacgaaatccgccagcggcgacagcagataaagcaccgtaccgttcacatcgtccgggtgctgcgccccggccaacgcgcgcccctgctcgtacagctggtggcgctcggcggggacatactcggtagcttccacccgcgtcaggcccggcgcgatggcgttgacgcagatgccctgcggacccagctcacgcgccatcgatcgggtcatcgcgatcagcgcgcctttgctggcaacataggccatcaggcgcggcgcgccccacagcgcggtgtccgacgccacgttgacgatcttggcgtgcgggttgcgcgccagcagcggcaccgccgcctggctcaccagccaggtgccgcgcacgttgacctgcatcacccgatcccacagttcgatatcgtattccatcatggttttaccgccgacgccggtcgccagcgccgcgttgttcaccaggccgtcgatcccgccgccggcggcgatcttctcgaacgccgaacggatcgaatccggtgacgccagatcgatggtttgcgtttccacctgagcaccctgctcgcgcagcgcggcaccgctcgccgccagctcatccgccaaaatgtcgcacatcaccacctgcgcgccggcagcggcgatggcggcggcgaagctgtagcccaggccgcgcgccgcgccggtgaccacgatgcgtttaccgttcagcaggccgttcactgcgccgcctcccgctcgcgcagcgtcgccagctgtttttgcgcctctttctgcatcaggcggcgcaggcgagaaagaccgacgtcgtgctggtacagatattcgcggccgcgggcgttaggcgccatgttctcaagcacgatgcgatcctgctcgagcacgtcccaatgcaacgattccagacgattgcggtacatgaagcgccacatgtcgcgctgccagtccttgaccttacgaatgcgccagaagaatacccggcagtgatccttgtcctccggcaccaccatgccgatgatccagaagtgaccgcccggcccgaagcgcttcttgtacgggatcgacaggcgcatccaatacgcgccgctgttgccgaattccacccagtcgaagttgacgccgatctggccgtttttcttgaagatgaagccgctgtcggtcggctccagcgccatgtccgccttgcgatccccttccgccatcgagtgtgaagaggagtgcaggtaggtgccgtgcatcggatccatcacgttttccagggcgtactggtagttgcagttccagctggcggtgcacagaaaatgactgtacgacgcttcgtccgccagctcttgcgggaaagtcagctccgccggcgtttcatccgccgtcacgccgaaatagaggaacaccgcgccataggcttctttggccgggtaagatcgcaggcatttttgccccaccagcgggcagcgatccaccgccggcacgtctttcaccgtcccgtcgccgccgacttccaccccgtgataccaacaggcgatgcgatcgccgaggttccaccccatggaaagccgcgcgccacggtgcgggcagcggtcttccagcgcatggatctggccttcaccgtcgcgccacaccacgatttgctgccccaggcgggtgataccgaccgggttgttgcccacttcccagctggccagcaccggataccacatgccgcgcagcccctggtcaagatagtcctgcaagctctgttcggaggatgttgtgtttgctgtcattgtcttctcccgggtgtcgctcagaaaccgttaacgtgaaggaattcgcggaacgtcgcctcattccacggctggccgctgcgatcgaacagacgacgctgattcaacgcgctgacgatctgctccagctcttccgccccctgatcgaagatcgtttccagcgccgccaccagggcagtttcgaagccgtccggcacccgggcacggttttgccagatgacattgcggaactggcccggctgatggatttgaccgttgccgccttcgcgggccggcgtcacctgttgggtgtccggcagccagggattgaaatcggtgatgtgctgcatgattactcctccgcgataaaagtgatctggatttggttgtcgaccacccgggtgggataggtttgcagatcgcggccgcccggctcgcgcaggcactggccggtacgcacgtcaaacagcgcttcgtgcagcgggcactcaaccttgccgtcgtctacaaacccctggctgagcaaggcataagcatgcgggcagacgtcttccagcgcgtagtagttaccgtcgagcaggtacaccccgatctcctttccttccactttgccggagaaaggaaaatcttctttcacctgagacacttcgcacacattcttccagctcattgcttttatcctctatctgattgtttcatatatgaaactcagtttcttatttaatacagccactataagtctggcgaaactttcgtcaagcgagcggaacggcaaatgttaatgaaaggttgtttaaaaatgacaaatgcgggaaagatcacgaaatcatgcaccgatatgaaaaacctatgtcagttgtgcgctccctcgctaatttatggcaaaaaatgcgttgatcccggcggcgtattgcgcgtaaaagtgttttctctctgtcttttacaccctatttgataacaataaatttacatcaatcagccccatccccgcgtttgcgccaaatggcatcctcgggtgagtttactgctgcctgaattcgtcaaccgctcgcactgaggaacgcgccgtgcaacaacgtcaacgctggtttggggtgatcgccctgctgtttctgatcgttatcgcctatgcggatcgagttaatatcgccgtgatgttggtcaatcccgacttcctgcaacactttcaactcggcggtgaccgcgctcaccagggcacgctgatgacggtgtttttattcggttacggcctctccgccatgttgctgacgccgtttctggaaacgctgatgggttaccgccgcgcgctgacgctgagcgtggtgctgtgggcgctgctcaccgccgcctcgccgctggcgggatcgctgctgttgctgtgcgtggtgcgcgcgctgcttggcgtcagcgaagggccgctgttctcgctgaaaaccatgtacatcagcgatcatttcgctgccgacgagcgcggcaagcccaacgcggtcagcgcgctgggcgtctcgttggggctggtgatcggctttccgctggtgagttttctgatggcgcacttcggctgggcgatgtcgtttcacctgctggcgctgctcaacctgctgttgggcctgatgctggtgcggctgttcgttcatccgctcgccttatcttcatcttcacgccccgccgatccgcaaccggtgctaagccgcgtctggcacacctttgcgctggcctggcgcacgccgatgctcggctggatcctgctgatcgagatcgccacgctcagttacctgtggggctccagcgcctggctgccggcttacctgaccgatgaaaaggggttctccatcaagcaaatgggctggatggccgcgctgcctttcatcgtcagcatcgcctccaaatacctcggcggcgcgttgctcgatcgcatccgtccttatcaggcgccgctgatcttcgtctttggcggcgcggcgaccgcactgtgcatctatggcgtaatgaacagccatcagcttggctggatcgccttcttcctgctggcggccaacgcctgttggggcgtgcagggcgcggcgatccccacgctgctgcagcattatgcacggccggaggcggtcggcagcgcctatgggctgatcaacggcatcggcaatctgttctcggcgtttgtgccgatggtgatgggcatggtgatggccagccagggtaaggtgtcctcgggctttgcggtgctgattgcctcacagctgctgacgctgctggccggcggcgcgttgtttggccgcatgttgctggcgcggcaggtgaagcgggcataaccccgttcccctctcctccgtagcggaaaaccgaatgctttaagtgggtgctcagggatctggacgccaacaaccagcagacgggggacatcccccgtcgccgggttgccttaccgttcggattcgtaagccaaaatggccgcaacctccgtgttgcccgatcggatccgcagctcacacagcgtgctgcgcgttatccatgccagtgatattaccgtggcacaaataaccaccaattttaacaggctccgtttgttcggcatcatgccttcttctccttgcctcgcggcgggtaagaggctaacttaacgttgtctggcgttagagttggcctcgggttgatgaatatcgactcggggcttttctctttgtatctttcgcagaagctccagagacaaagatccagagcacccgcgcgcagtatattcatccaccccgctatcccggctccctttttcctgactctttttcatttctgcgcaggattgcgcaaaggcgttgcaacaggctgaaaatcgcagtgcggatggcgacaaacgaaataaaaaaagcggagattgatgacaaacctcatgccattgctgggcttgcacagagaaacgtataaaaaacaaataaaattaatttattaactttctgttgatgaccgcaagggaggaaaaaccgaaagcgttgagagggtgctcagggatctggacgccaacaaccagcagacgggagacatcccccgccgccgggttgccttaccgttcggattcgtaagccaaaatggccgcaacctccgtagtgcccgatcggatccgcagttcacacagcgtgctgcgcgttatccatgccagtgatattaccgtggcacaaataaccaccaattttaacaggctccgtttgttcggcatcatgccttcttctccttgcctcgcggcgggtaagaggctaacttaacgttgttgggcgttagagtaggcctcgggttgatggatatcactcggggcttttctctttgtacctttcacgcaggctccagatacaaagatccagagcacccgcgcgcagtatattcatccaccccgctatcccggctccctttttcctgactctttttcatttctgcgcaggattgcgcaaaggcgttgcaacaggctgaaaatcgccgcgcggatggcgacaaacgaaataaaaaaagcggccccaattcgatgggagccgctttttcagcgaggcgtggcctggcgtcaggcgtgtttcttggccgcctgcaggtacagcatctccagacccaacgtcgccgcggccagcgcggtgatctcggactggtcataagccggcgccacttccactacgtccatgccaacgatgttcagcgactgcatgccgcgcaccagtttcagcgcgcgatcggaagtcagaccgccaatcaccggcgtgccggtgcccggtgcgaacgccggatccagacagtcgatgtcgaaggtcaggtacaccggcatatcgccgacgatgcctttgatctgggtcagcaggtcgtccacgctgcgatcgttcacctgcgcggcgtccagtacggtaaagccgttgtcatgatcgaactcggtgcgaatgccgatctgcaccgagtgatgcggatcgatcaggccttcgttcggcgcatggtagaacatggtgccgtggtcgaacttgctgccgttggcgtaggtatcggtatgggcgtcgaagtgcaccagcgccagcttgccgaaatgcttggcgtgcgcgcgcaacagcggcagggtgacgaagtggtcgccgccgaacgagagcatgcgcttaccggccttcagcagtttctccgcgtgcgcctgcagcttgtcgctcatgtcctgcgcatcgccgaagttgaacacgatgtcgccgcagtcaaccacgttcaggcgatcgcgcagatcgaagctccacggccaacggttgccttcccaggccaggttggtggacacctggcggatggccgccgggccatgacggccgccggcgcggccggaggtcgccatgtcaaacggaatgccggtgatgacccactctgcatcgctgtcgtaaggcatgaagttcagcggaaagcgcaggaaaccaaaggcgttggacactaatgaattatcggactgatggcctaaggtgctcatagtaaaccctcgtagttcaacaagttgccgggcgcagacgccgggccgttacaaaaaaaaaatccctcccgcgtcgttagcccgacgagaaagggatttattcgatgtgtgtttcggtgctaccgatacggcagattatggctgcattttgctcatgcttcaagggggccgacatcgcccccctgaagagggcggttactcgtcttccagatacgtgtaaccgtacaggccggcttcaaactcttccaggaactgcgcctgcagctcgctgtccagatcggtttctttgacctgatcgcggaatttggacagcagcgcgctcggatcgagctgcacgtactccagcatgtccgccacggtgtcgccctcgtcggacaattcggtctcgacgctgccgtccgggaacacgtacacgtcaaccgaggcggtgtcgccgaacaggttgtgcatgttgccgaggatctcctgatacgcaccgaccatgaagaagcccagcgccggcgggttctccggatcgtacggcggcatcggcatggtggtcgccacgccgtcgccgtcgacgtaatggtcgatggtgccgtcggaatcgcaggtgatgtcgagcagcaccgcacggccttccggcggcttatccagcccttccagcggcagcaccgggaacagttgatcgataccccaggcatccggcatcgactggaacagcgagaagttgacgtagaacttgtccgccatgcgctcttgcaattcgtcgatgatcgggcggtgcgcgcggttgctcggatcgagctgctgctggatcttgttgcagatgttcagatacagctgctcggcccaggcgcgcttggtcaggtccagcatgccgtgcgcatattgggtatgcacatcgtgcagatccatctggctgtcgtgcagccattcacgcagcgagcggcggttctccggctcgttcatttccagccaggtttcccacatgctttccagcgcgcgcggcgcgtcggcttccggcggctgcggttcgctgaattcgttgcgctctacgccgatcacattggagaccagcaccgtgtggtgcgcggtcacggcgcggccggactcggtgatcaccgtcgggtgcggcaggccgtgttcgttacaggcgtcgccgatgccccaaatcacgttgttggcgtattcgttcaggccgtagttgaccgagcaatcggactgcgagcgggtgccttcgtagtcgacgcccaaaccgccgcccacgtcgaagcactgaatgttgacgcccagcttgtgcagctcaacgtagaagcgcgccgattcgcgcacgccggtggcgatatcgcgaatgttggccagctgcgagcccaggtggaaatgcagcaactgcaggctgtcgagacggcccgcttcgcgcagggtctccaccagcttcagcacctgcaccgccgccagaccgaatttggacttttcgccgccgctcgactgccatttgccggagccttgcgacgccagacgcgcacgcacgcccaggcgcggtatgacgttcaagcgttcggcttcttccagcaccaggttgatctcggacatcttttcgatcaccaggtacaccttgtgccccagtttttccccgatcagcgccaggcgaatgtattcacgatctttataaccgttacagacgatcaccgagcgggtcatgccggcatgcgccagcaccgccatcagctcggccttggagccggcttccagccccagcggctcgccggaattcaccagcgattcaatcacgcggcgatgttggttcaccttgatcggatacaccaggaaatagccgccctggtaaccgaaggactcgcgcgcgcgtttgaacgcggcgttgatcgaacgcaggcgatgctgaaggatctgcgggaagcagaacagcgccggcagacgttggccgtcttgctggcgcgttttcaccagttctgccagatcgacgcgcgcctgcgggacatccggatccgggcacacgctgatatggcccagctcgttgacgtcatagtaattgttgccccagtaggcgacgttataagtacgcagcatcttgctggcattacgatcattcatggcaacctcctgcatggagcgcaaagataaagactcgcccgcaaccggcggacggtgaatcaacagatcatcagacatggttcgcctcacattccgtactgacgaaaccgccagccactatcgcagctacaacccgcgagaacaacccaacaagccgcgccggcggcagcgaagagaactgccgttcgcggtcagcgatcggtttatcactcatataattgtaagacaccctgttcaaacctcgtgaatcgggccaagaaacatcccacaggaaggctgcaggctacccttgttcagttcttcagacgaccgttagccggcccgagaatcctgagtagcggccaagtgtttatcgcacctggtaagtgacagagagacaagacgggaaatagcagaagaatgtgcgccagaacggcactgctgttgggaaccaacaaccggtagacaacggatcattaatccaaccacctccacgcgcgccgttcggagtgaacgacccagcctctaaaatagtgtaagaacgtgaccgttcgatgaagcggcggcgccacggcgaacgcccgcgacggataatagcgcaatgccggcgaatgcaaagcggaagtttatcgtaccttcccccacgccagaccgccgtactgtgcagcaaatgaaccgcgcgcgcagtttataccggtaagcaggtgaaaaagcaaaatgaaaattcgccgaaaactgtttcaagcgatgaaaatggcgccaacccgtttgcgcaaaagagcgaaagcgcaaaaaattactggcaatctggctaaaccctgacctaaaatagacgtccagatgttaatccatctatactggttaactgataaactgcttaacggctttgcctgaggggcgttgcaggatgcatctcgcgccatcagcggaagacccttcgcttcgatgccggatctccagcgctgtgcagtaatttctaacccgtcttatgcaaggtaaagaacacaatggctaaacacctcttcacgtccgaatccgtctccgaaggacatccagataaaatcgccgaccagatctccgatgccgtcctcgacgccatcctggaacaagatccgaaggcgcgcgtcgcctgcgaaacctacgtgaaaaccggcatggtcctggtcggcggtgaaatcaccaccagcgcctgggtcgatatcgaagagatcacccgcaagaccgtgcgcgagatcggctacgttcattcggacatgggctttgacgccaactcctgcgcagtattgagcgctatcggcaagcaatccccggatatcaatcagggcgttgaccgtaccgatcctctcgagcagggcgccggcgatcagggcttgatgtttggctacgccaccaacgaaaccgacgtgctgatgccggctccggtgacctacgcacaccgtctggtgcagcgccagtccgaagtgcgtaaaaacggcaccctgccgtggctgcgcccggacgcgaagagccaggtgaccttccaatacgacgacggcaaaatcgtcggcatcgacgccgtcgttctgtccacccagcattccgaagacatcgcgctgaaagatctgcaagaagcggtgatggaagagatcatcaagccggtactgccggcggaatggctgacggcgggcaccaaataccacatcaacccgaccggccgtttcgttatcggcggcccgatgggcgactgcggcctgaccggacgtaaaatcatcgtcgacacctacggcggcatggctcgccacggcggcggcgccttctccggtaaggatccgtccaaggttgaccgttccgcggcttacgcggcgcgctacgtggcgaaaaacatcgtcgccgccggcctggccgatcgctgcgagatccaggtgtcttacgctatcggcgtagcggaaccgacttccatcatggtggaaaccttcggtaccgagaaagtgccaaccgaacagctgacgctgctggtgcgcgaattcttcgatctgcgcccatacggcctgatccagatgatggatctgctgcagccgatctaccgcgaaaccgccgcctacggccacttcggccgcgagcacttcccgtgggaagcgaccgacaaagctgagctgctgcgcgatgccgccggcctgaaataagccccgacatcaacatgaaaaacggcgagccaaggctcgccgttttttttgagcggatgggtgctcccggatcaacgcatcgactgccagcaagcggaggcaccgcccccgccgccgggttgccttaccgttcggattcgtaagccaaaatggccgcaacctccgtagtgcccgatcggatacgcagctcacacagcgtgctgcgggttatccatgccagtgatattactgtggcacaaataaccaccaattttaacaggctccgtttgttcggcatcatgccttcttctccttgcctcgcggcgggtaagaggctaacttaacgttgtgatgcgttagagtaggcctcgggttgatgaatatcgactcggggcttttctctttgtatctttcgctcgggctccagagacaaagatccagagcacccgcccgcagtatattcatctcaccaccacgcctcgtgttccttttcgcccccaatatcatttttgcgcgaccgctcgcagcgccttacaacaccatgaaaaataaaaaaaggctcagcgacgctgagcctttgatggcagaaaaagcacggccgagatgccgattacgacgtctgcttacgcaacagataaacgaagtacggcgcgccgataaaggtcgccagtaacccggcggggatctgatacgggaacagcagcatccgcccgcaccagtcggcaaacaccatcagcaagccacccaacagcgcggcgatcaccatctgcggcagcgcgcggcggaagcccagcatgcgcgccatatgcggcgccatcagcccgacaaagctcagcggccccacggtcagggtcgccatggcggtcagcgtagcggccagcaacaggatggtcaatcgcgcaggtgtcaaggcgatccccaccgaacgagcggtagcgccgccaagcggcaggatggtcagccaacggcggcacagcggcgccaataccatcaggcaggcggccaccagcgcggtgcgcagcgcctgcgccggctccaccgaataggtcgagccagagagccaggtcagcaagccccccatacgcggatcgccgctggccaacagcaggaagatgacggtggtaaaggcggtgctgagcgcgataccggcgagcagcatgcgttccgtcgagaaaccgccgcggcctgcggcgatcatgatgatcagcagcgtaacggccgcccccagactgccggcgggcagcagccaaacgaaggcgtcgcccggcaccataaacaacatcatcacggcgccaaaagcggcgccggaactgatgcccaacacttccgggctggccatcgggttgccggtcagtttctgaatcagcgtgccggcgaccgccagcatcatgcccgcggccaacgccgacagcacccgcggccagcgccacggcagcagggagtccagttctgcccccaggctccagtgccagccgccggcatttttacccagcatcagcgccagcgtcaggccgatcagcaatacgaggccacccagcaggatccagccgggcagattcccgcgctcggcaggcaccttatcgcccaggttcatcggcggcggcgtggcggcgctgcgcaaacgcggcaacagccacagcagcagcggcgcgccgaacagcgcggtggccgcaccggtcgggatctcgcgccacacctgcgtcaccccgagcatcacctgatcggtcagccacagcaacagcgcccccagcaacggcgccagcatcatgcggtgcgccagacggcgcgcgcccagcatcttcgccatcagcggcgcaaacaggccgataaagccgataacgcccacggcgctcaccaacatggcgctgaagatgatggccagccccagggcgcagaagcgcgccatcgacagccccaaccccaggttgcgcgccacgccgtcgtccagccccagcagcgtcagcgggcgcagcaatagcgccgccagcgcaccggccaccagcaaacgcggcaggataaactgcaccgtgctccaatcctgttggttcagcgcgccggtgccccacaggaacatgccctgcagttgatcgtaatgaaacagcgccagcaggctgttgaccgcgccgcagtaaagtcccagcaccagcccggccagaatcagcgtcaccggcgacatccgcttgccccaggcgacgccgaacaccagcccgcccaccacaatcgcccccaccatagcggccaactggcgggtgaactcgccccccggcagcacccacagcgtggcgatggtcaggccgagctgcgcgccggcggccacgccgagcgtcgacggttccgccaacggattgcgcaacacctgctggaacagcacgccaaccaaccccagaccggcgccggccaacagcgacaccgtcaaccgcggcagcaggctgtaatggaacagcatttgccgcacgtcgtcgatgttcggcgcgctgagcgcccgcacccattgcgccggcggcagctgctgcaccaggttatatatcgtcaaaccgcctgccgccgccagcaacagcaagatcagcgtcagcggcaatttccggatgcccgcattcatgacgcactctcctgagcctgcgccaacaggcggcaaaaccgcatcgtcgacagcgtagcgccatagaaccacaccgccggcacctgccgcagctggttttgccgcacgaagggcaacgactgccacagcggcgtcgcgctgaccttgtccatcatcgcctgattgccgtgatcgagataaatgacccgggcgttacgcaccgtggccaatcgttcaatccccaccaccgccgtgccccaaaaatcggttggctcctgccaggcattgcgaatgccgagttgatccatcgcttcctggaacagacttttctggccgatgatcagcgcatggcgcgtgtcgatcagcgaaaacaacagcagcggttgccgggtgtagctttgcaggcgctgacgcgcgtcctgcataaagctgtcgaactgcgccaggtggtttaccgcccggctttctatgcccaaccgctggcccagcgccagcagcgactggcgggcgacggtcagcggtttgccgctgccgtcgttgaagccgaagctcatggttggcgcgatgggttggattttgcgcggcgttgggccatagccttgcgacaacaacaccagcgaaggccgaagctgctgcagcagttcgaggttcggttcggtgcgctggccgacgtcgaccaccgtcgccggcagctttggctccgccacccacaggttgtagttatgcacatcggccaccgccagcggcgtcacgcccaatgccaacagcagctcgatcggcaaccattccagcgccgcaacgcgcgcgatatccggcggcgcatccgccgctcggccgggcaacgaacccaacagcggcgacagcgccagcgccatcaacaaacggcggcgcagcggatcgtgagaagaagtgaatgtagaggacatcagtagacaaaactcaccggcgcgccgccgctcggatgcggcaacgtgcccataggaataccgtaaatttgctccagcaccggcccctgcatcagctccagcgggccgccctgggcgatcatttcaccgccgcgcagcgccaccaaatggtcgcagtagcgcgccgccatgttgatgtcgtgcagtacggcgatcaccgtaagatcgcgttcgcggctcaagcgctggatcagcgccagcacctcgacctggtgcgcgatatccagcgccgaggtcggttcgtcgagcagcaggcagcggctgtcctgcgccaccatcatcgccagccaggcgcgttggcgctcgccgccggacaggctgtccaccagccggttggcgaacggcttcaagcccaccagcgcgatggcctcttccacctgttgacgatcgttggcgccaaaacgccccagcgcgccatgccacggataacggccgacggccaccagctcgcgcaccgtcatgccttccgccgccggcaactgctgcggcaggtaggccacctggcgggcgaaggatttgctgtcccactgcgccaacggctgctgattgagcaagacctggccgccgctgggcgcatggtgccgcccgagcagtttcaacagggtggatttaccggaaccgttatggccgatcaggccgcagactttgccctggggaaaactgagcgacagcggttgcagcagcacccggccggggacggcgaaactggcgttatccagcgcgaaggtcgcgccgggattaagaagtttgtcctgcatagatcctgctttgtccggggcgacgcggtgccgccccggctatccggttagaaacggaaggttgcggtggcgaccacctggcgttctgcgccccagtagcaggcgtagtcgcggtagcagctcgacacgtaggtcttgtcgaacaggttgttgatgttgacgcccacggacgaacccggcaggccaaagcgcgccagatcgtatttaatggtcgcgtccaccagcgtgtagtccggcactttgaaggtggagttatcgctgttgaagctcgagctggagccgacgtaacgcacgccggaacccagcgtcagaccgctcaccgccgtttcgtggaaggtataatccgcccacagcgacgccatatgtttcggcacctcgacggtcggtttgccctgataggtattgtccttggtgtacttcgcatcggtataggtataggaggcgatcaggttgacgttggcattcaacgccgccttggcttccagctccacgccgcgcgaacggatctcgccgctctgcacgctgaactgcgcgttatccggatccggcgtcaggttgttgttcttggtcagctgatacagggcgccggtcaacacgattgggcgatccttcggcacgtatttcacaccggcttcatactgcttgccgatcgagggcttaaaggtctggccgttgattgacgtatcgagggtcggttcaaacgactcgctgtagctgaaatacggcgtcacgccgttgtcgaacaggtaattcaatccgccgcgccaggtaaactgcccatcggagcgttcgttggtgtacccgagaacgcggttattggccgacgttttcgcccagtcatagcgcccgcccagcgtcaacagccactggttccactccccttgctcctgcacatacaggccggtttgctcctgacggttcaaatacttgtatgggaagttgatgttgaccacatcattgccatactgcggctgggtcatgctcaggccgtctgcggaaccatagtcggaattgatatcgttgcgcatacgcgaataatctacgccaaacaacagcgtatggtcgatatcgccggttttcaccttcgcctgcgcctgagtatcaaccgcaaaattgttcaggtgctctttcgactgaacataagcgcgattgatcgtcgtcggtgatgacaagccaaatccgtagatgctcttcatatcggtgtccacctgcatataacgcaggttctggcgcaccgcccaggtatcgttgaaggcgtgttcgaaactgtacccaatcatccgctgcttgcgcgccatatagttgctggcttcgccttcgttgaaatcggtcggcagtttgctgccgtccggcaacgggatcagcgtgccctgcttcggcagccagccgtaataaccggtatagggatcgttttgaatgttggccagcagcgtgaagttggttttgtcatccgggcgccagctaaaggacggcgcgatcgcatagcgcttctctttgctcatgttttgctgcgtatcgctgtctttcgccaggccggtcaggcgataggaatagatgccctgatcgtccagcgcgtcgctgaaatcgaaaccggtctggaacaggttgtcgctgcccatcttgaactggatttcgcgcagcggctcggtggttggccgcttgctgaccatcgagaccaaaccgcccgggttgcttttgccgtacagcaccgagaccgggccgcgcagcagttcggcgcgttcgaggaaataaggatcgatggacgcttcgctgtagttgtcgcccagcaaccgcaggccatccagatactgggtggtgttggtggccgggaagccgcggattgccaccgcgtcataggtcgtggagctgccacggctggcgaatacgcccggcgcataggccagtgcgcccttcaccgtatccggctggcgcatatccatctcttcacgcgttaccacggaaacggactgcgggttcttctcgatcggcgtatcggttttggtgccggtggcgctgcgcttggcgacataggtgccgaccggcccccaggcgctttcctgctgggcggtgttgctaccgcccacaacggtaatcgtgtcttccttggcggccggcttggcgtcggcggaaaaagccggcatcgccagcgtgcccaacgccgcagcgacggtgatcgctaacgcgttgacggggagacggccctgcttggccgcggatgatgaaagacgcttggtcagcatgatttatttctctgatgaattattaaatgacgaatgtaaacgataataattattataagcgtcgcattttatgcagaagccaaattaaactgcaagccgaattcatagggcaaataggttaaggattaggcgcttagccttgcagttaacagggaaataaaacgagcggaaaaataaaaaagcccgcaaccaaggttacgggcttaataacaaagaaaaaactttcaccggggccgacgccccggtagcgattactggccgaacatatccttgatccagccggcgacgccatcgccatctttttgctcacccgccgccggttgttgctgttgctgcaccgccgcctggctggcctggcacaatccctgcggattgtcggtccagaccgggatggtgcgccaactgccgccgccgcagataaagttgccggcggagtcgatgctcatctggttaatgccttccggcggctgcagcatcagcggcagcggcgtctggttttccagatagcggcgatacagggtcaacgcgccgttggcgccggtcagcttggccgggccgttgttatcgcgcccgacccaggcgatcgccacttccttgccgtcgatgccggcgaaccagctgtcgcgtagatcgttagtggtaccggttttcgccgccaggttgtagttcgggaacttcaccgacagcgagcgggaggtcccgcgcgccacgccctgctgcatcgcgtacagcgtcaggtaagcggcctgcgccggcaccatgcgctccgcctgcgggaagctctggtacagcaccgtgccgtcttcggcgatcaccgaacgcaccgccgacagcggcgcacggttaccgccgctggcgatggtctggtactcctgcgccacttccatcggcgtcaggccgatcgcccccagcagcatcgaaggtaccgggttgatctccgctttcgggatgcccaggcgttgcagcgtggcgctgatctgatccagcccgaccgacaggccgaggttcactgtcggcacgttcagcgagttggccaacgcatccaccagcatcacctgaccgcggaatttgcgatcatagttgttcggctgccagacggcgccgttcggctgtttcagcgacagcggcgcatccgccagccaggtgttgaggcggtatttatccggttcggacagcgcggtcagatacgtcggcggcttggccaacgagccgaccagacggcgcgcctgcatggcgcggttgaaaccggcgaactgcgggttggcgccgccgaccatggcgcgcacttcaccgctgaagcgatcgacaatcaccatcgccgcttccagatcctgcaggtgacgcgcggcgcgcagcgccgggatgccgtcttcgaccgctttttccgccgcgtcttgcgacaccggatccagcgtggtgaagatcttcacgccggacaggtcattgaccttatcgcccagcctggtttgcagttcctgacgcaccatctgcataaacgccggctgtggcgtaatgacgccgcctttcggctgtacgcccagcggacgcgcgctcagcatgtcatacagctcgccgtcgatcacaccctggttctgcagcagtttgagcaccaggttgcggcgttccagcgccagtttcgggttacgccacgggttgtacagcgacgcgcccttgaccatgccgaccagcagcgcctgctgatcgaggctcagctcgtccaccgggcggccaaagtaatacaggctggccagcgggaagccgcggatctggtcgctgccgctctggccgagatacacctcgttcagatacagctccagaatgcgatccttgctgtaacggtaatcgaccaacagcgccatataggcttcgttggccttacgccacagcgaacgttcgttggtcaggaacaggttcttcaccagctgctgcgtcagggtactgccgccctgcaccgcgcggccggcggtcaggttggccagcaccgcgcggccgatggagtacgggctgatgccgtcatgctcatagaagtggcggtcttccgtggcgatcagcgtatccaccaacagatccgggaaaccggagcgcggcacgaacaggcgctgttcaccgttcggcgactgcagcatggtgataagacgcggatcgaggcggaagaagccgaagctgcggccgctgtccaggttttcgatcttcgccaggcggttgttctggaaatcgaggcgggcgcggatctgcccttctttaccatccgggaagtcgaacgggcggcgcagcatctcgatgctgttggcctgtacggtaaactcgcccggacgcgtcatgcggctgacctgacggtactgcatgccttccagcaggttgaccatctccttcttgctgtacggcatgcccggttccaggttgaccatgcggccgtacaccgccgccggcaattgccagactttgccgtcgatgcggctgcggatctgggaatccaaatagacgccgtagatcgccaacaggacggcgagcaccaggatcagtttgataatcaggccgagccagcggcgttttttacgcggcggagtcgcttttaccttacgcggcatgcgttcctcctcctcttcatactcatcatcgtcatactcgtcttcttcgtaatcgtcataatcgtcgtctcggcgacggcgcggcggcttgcgcgacgcggtgctttttggttgttttcctttgcgcccgatgggctcgcggtcatccccagccatggctgttgttctccgagcttgccgacactgccggccatgattagtcgcttaatctgtgccgacgccgcagcgctgaccagaagaaacatctgaattccaaaccttgaatgatcgcgacctactgatatttcttcgttcggcgcgtaggtaccgccgtggccggatcgtccggccacacgtgtttcgggtagcggcccttcatctctttttgcacctcgcggtaggcgccttgccagaaggccgccagatcgccggtgatttgcaacggccggtgcgccggtgagagtaactcaagcaccaccgggatgcgaccctcagccaacatcgggctgcgctgctcgccgaacatctcctgcaaacgcaccgccagcgccggcggtttgccggcctcataacggatcggcaggcggctgccggtcggcacagtgtaatgagtgggtagcgcattatccagccgctgcttttgctgccagtccagcaggcgggacaacgcctcggcgaggttgacctgcttcaagccgcgcagatcgcgcacgccgttcagcgacggcagcagccactgatccagcgccgccagcagcggctcttcatccatcgccggccactccgcctccggcagccaggcttgcgcgcactgcaggcgcacccgcaattgttcggctgcgccctcccagttgagcaccgccagcccctgcgcgcgcacccaatcgagcagcgcctgctgcagctcttcgtccgccggtttggccagcggctgagcgcgcagcgtcagacggccgatctgctggcgcttccaggcgcgcagcgtgcccttctcttcatcccattccaccgccgtgcgctgcatgaccatcgccggcagctgcgccgccagcgcttcgatgtccaccggcaacgccaacaggattcgcgcatcggggctgttgtggccctgcaacaggctggggacgatcagccagggcgcgcgcgacagcgcctcatcctggttcatcgccgcccccatgccgttagccagcaagtagcgaccgtcctgaccgcgacgctgggcaatgcgatcggcaaatgccgacgccaacaggcgcggtgccaactcgacgtcgacttgccccgcacgttgcggcaggcgtttggccaactgcgccgcgcgctgccgccagttcgcttgcgggcggctcagccaataaccgatatccatctgcccgccgcgcggcgattcttccagcaacgccgccaacaacaccgccgtcgccaggccgtcggcgctcagcgtcgcgccggcaaccagcatcgccgccagccgcggctcgcatcccaacgcggccatctggcgccccggcgcggtgagtttgtcgccgtcatccgtagcccccaaccggcgcaacaacgccctggccgccgccaatgccgccgccggcggcgcatcaagccaggtcagctgcgccggatcgtagcaaccccactgcaacagttcgagccagaagccggtgagatcgctctgtaaaatatccggttcggcatgttccgccgcgcgttccgcctgttctttggcgaacagatgccagcaaaggcccggctccaggcgcccggcgcgcccggcgcgctgtaccatcgaggcctgactgatgcgctgcgtcgccagccgcgtcaaaccgttgcgcacgtcgtaacgcgccacgcgctccagaccactgtccaccaccagccgaatgccctcgatcgtcaggctggtttcggcgatgttggtcgccagcaccaccttgcggcggccaggcgccgccggctgaatcgctttttgctgttgcgccagaggcaaggcaccatacagcgggcaaagatcggtatcgctcgccacctcgccggtcaatcgctccagcacccgattgatctccgccacgcccggcaggaacagcagcaaagatcccggctgttcggccagcaaccgcttcaccgccgccgctacgccgtcctccagccgctgatggctggccaacggctgatacaggcgttcaaccgggaaactgcgcccctcggacaccactaccggcgcttccggcagcaactgcgacaggcgagcgttatccaaggtggccgacatgatcagcagtttcagatcgtcgcgcagcccttgctgcacgtcgagcagcaacgccagcgccaaatcggcctgcaggctgcgttcatggaactcatcgaggatcaccaacgacacgccctgcagctcggcatcctgctgcagcatgcgggtgagaatgccttccgtcaccacttccagtcgggtttgcggcccgcttttgctttcggcgcgcatgcggtagcccacggtctgaccaggctcctcccccagttgctgcgccaggcgataggcgacgtttttcgccgccagccgccgcggctccaacatgataatgcgccccggcaacccggccttagccaggatctgcagcggcaaccaggtggatttaccggcgccggtcggggcgtgcaacagtacctgcggggcagactgcagcgcagccagcaactcatcgagcaccgcgctgacgggcaatgaagacactgaattctccgtagtggttagcgttaaacggcgtacagtgtagcattagctttgtccccgtagcctttcaaactgcggcgtcgttagctatagtacggagctcattcgtgcgccgcgccgctcgcggggccgctgccagtaacgtttaccgctgttcccgaccgttttgtcatgcatttgccgagtccttatgtccaattcgcgccgcctgtttttcgccctgtccttgcctgacgccctgcaacagcaggtgatccgctggcgcgccgaggcgtttgcgccgggggccggccggccggtggcggcggccaatttgcacctgacgctggcgtttctcggcgaggtcagcgcgcagaaagaactggcgctgcgcaaactggccggccgcatcgtgcaacccggcttcagcatgcggctcgacgatctcggccattggccgcgccccggcgtggtctggctcggcacccgccgcgcgccgcgcgggctgctgcagctggccgagctgctgcgttcgcaggccgcccgcaacggctgccatcaaagcgcgctgccgttccatccgcacatcacgctgctgcgcgccgccactcagccggtggcgctcccgccggcgacgccgggctgggcgttcagcgccgacgccttttccttatatgagtcggtgttcgaaaacggccgcacccgctatcaacacctcgaacagtggccgctggccaaacaggcatccgcatgattttctctccaccgctgcgttccgctacgctgatcaaacgttacaaacgctttctggcggacgtgatcaccccggaaggggaaacctttacgctgcactgcgccaataccggcgccatgaccggctgcgccacgcccggcgacaccgtttggtactccacctcggacaatcccaagcgcaaatacgcccacagttgggagttgacccatacccaacaggggcactggatctgcgtcaataccctgcgcgccaacgcgctggtgcgcgaggcgattgaacataatttaatcaatgaattatccggttacagtaaaatcagcggcgaggtgaaatacggcggtgaaaacagccgtatcgatttgttattacaggcagaaaatcgggttaactgctatattgaagttaagtcagtcacattactgcaacaacaacgtggttactttcctgatgcggtaacgctcagagggcaaaagcacctgcgtgagttgctcagcgtggttgaaagcgggcaacgggcggtgttgttctttgccgtgttacacagcggtattgagcaggtcgcaccggcacatcatatagatgagcgctatgcggcgctgttggcacaggtccggcagttgggagtggaagtggtttgctacggggcaaagttatcacctgacggtatttatctctgcgataagctgccgttttttatcgattagcgcagtcgggtccctataaatagacaaccggccagcacgatcgccaaatacgccctccttcacacgattgtcaagcgggcgacaggaataattgccaacctaccttccttctgttatttatagcggcctgtttttcccccgcattggggattcgatagtgcgtgtgtatgtaggagaagcaacatgcaagaagggcaaaaccgtaaaacctcgtccttgagcattctcgccatcgctggggtggagccgtaccaagagaagccgggcgaagagtacatgaacgacgcccagttgtcgcatttcaagcgcattcttgaagcgtggcgcaaccagctcagggacgaagtggaccgtactgtatcgcatatgcaagaagaggcagccaacttccctgatccggccgaccgtgccactcaggaagaagagttcagccttgaactgcgtaaccgtgaccgtgaacgcaaactgatcaaaaagatcgagaaaacgctgaagaaagtggaagacgatgatttcggctactgcgaatcttgtggcgtggagatcggtattcgtcgcctcgaagcgcgtccgaccgccgatctgtgcatcgactgcaagacgctggctgagatccgcgaaaagcagatggccggctaataccgctactctacatgattggagctgcatcaaggcggcaagaatgcgcatcccgatgagcttactcaagtaagtgattcgggtaagcaggcgcagctaacacagatgcagtttcaagcataacgagtatgttatcgctgcggcgtgcgcacccgcgtgcgccgcacagagaaaagggaacctctcccctctgatatgcaagaaagtcattatgtggggcgctttgccccatcgccttccggggatctgcatttcggttcgctgattgccgctctgggaagctaccttcaggctcgcgcccaacgcgggcagtggctggttcgcatcgaagatatcgacccgccgcgcgaagtccccggcgccgccgctcgcatcctgtccgcgctggaacattatggtctccactgggacggccaggtcatctatcaatcccaacgtcacgacgcctatcgtgccgcgctggatctgttgcagcgccaggggctcagctattactgcacctgcacccgcagccgcatccagcacatcggcggattgtacgacggccactgccgcgatttgcagctcggcccgcagggtgccgctatccgcttgcgtcagaccgcccccgtttaccggttcaacgatctcctgcagggagaattgcacgccgatccggcgctggcgggggaagactttatcattcgccgccgcgatgggctgttcgcctacaacctggcggtggtgatcgacgaccattttcagggcgtgaccgagattgtccgcggcgccgatctgatcgaaccgacggtgcgccaaattgccctctaccgccagctgcaggcgccggtgcccgcctatgtgcatctgccgctggctctgggcgccaacggcatcaagctgtcgaagcaaaatcatgcgccggcgttgcccgccggcgatccgcgcccggtgctgatcgccgcgctgaaatttctgcgccaaccgctgccggaaagctggcaagatcttgacctgccattattattgagctgggcgatcgaacactggcggttggaaaacgtgccgcgtcaggaggctatccctctggatgaaaacacgccggcattctcaaaggagccatggtgagctatgattagccgctattttttgttagctccatttttatcagtcactatcgaggtgtaccatttttacccgagtagccaacttctgtcgtaaggtactgacccgcgatgacaagctgccccgcgacgacgcggcggccggcgataaaaacgtagtccgcgaagagcgtgccgcggcgccaagccgccctgcgccgcagccgcgcgccgccgataacggcagcaacgcccctgcccgccgctcaacgccgcgcaagcgtccgccttttcctatcgccgagagcaacgactcgatgaccgtgatcccgcgcgaacagcactcgatctcccgtaaagacatcagcgagaatgcgctgaaagtgctttatcgcctgaacaagtccggctacgaggcttatctggtcggcggcggggtgcgcgatctgttgctcggcaaaaagccgaaagacttcgacatcaccaccaacgccacgccggagcaagtgcgcaagctgttccgcaactgccgcctggtcggccgccgtttccgcctggcgcacgtgatgttcgggccggagatcatcgaagtggccaccttccgcggtcaccacgaacagaatcaggaatccgacaagaattcctcccagcaggcgcaaaacggcatgctgctgcgcgacaatatcttcggttcgatcgaggaagacgcccagcgccgtgatttcaccatcaacagcctgtactacggcgtggcggatttcaccctgcgcgattacgtcggcggcctgaacgatctgaagcaaggcgtgatccgcctgatcggcgatccggaaacccgctaccgcgaagatccggtgcgtatgctgcgcgcggtgcgcttcgccgccaagctggacatgcgcatcagcgaagagaccgccgagccgatcccgcgcctggcctcgctgctgcatgagatcccgccggcgcgtctgttcgaagaatccctcaagctgctgcaggcgggttacggtttccagacctacctgaagctgtgcgaataccagctgttccaaccgctgttcccgctgatcgcccgtaacttcacgccgaaccacgatacgccgatggagcgcattctggtgcaggtgctgaagaacaccgatcaccgtctgcagaacgacatgcgcgtcaacccggcgttcctgttcgccgccatgctgtggtacccgctgctggagcacgcgcagaagctggcgcaggaaagcggcctggcctactacgacgccttcgcgctggcaatgaacgacgtgctagacgagcagtgccgctcgctggccatcccgaaacgcatcaccacgctggtgcgcgatatctggcagctgcagctgcgcctgtcccgccgccagggcaaacgcgcgcacaaactgatggaacatccgaaattccgcgccgcctatgatttgctggcgctgcgtgcggaagtggaagacaatcaggaaatgctgcgtctggccgagtggtggggcgagttccaggacgccacgccggcgcggcagaaagccatgctgagcaccctgggtgacgatccggcgccgcgccgcgcgcgccaacgccgccctcgccgccgggcaccgcgtaaagaaggggcataatgatccgcgtttatatcgcgctgggcagcaacctggcgcagccgctgcaacaggttaacgccgcgctggaggcgctggagcatctcccgcgcacccggctggtcacctgttcttcgttttaccgcaccaagccgctggggccgcaaaaccagccggactttctcaatgcggtggtggcgctggataccctgttgccgcccgaacagctgctcgaccatacccaggcgatagaacgcaatcaggggcgcgtgcgcaaggatgaacgctgggggccgcgcacgctcgatctggacatcatgctgtacggcgaccaggtgatccataccgatcgcctgacggtgccgcattacggcctgaaagagcgcgaattcatgctctacccgctggcggaaatcgcccccgatctgattttccccgatggcgaaccgctcgccagctgcctcaagcgcgtgccggaaaacggcatggcgctgtggcactcgccaaaaccgaaatcctgacccgcctacagcgccaaccgcgcgacaaatccccccgccgggcgattggcgaaactgatctgtaaaccatgcaagccggcaatacgctgtacgatcgagagccccagcccgctgccggtctgttcctgccccggcgggcgatagaagcgctctccgagccgcgccagatgctccgtggtgacacccggaccgtcgtcctccaccgtcagcgaacgttcgctcaacgtcacggtgacgacgccgccctgcggggtatatcgcaccgcgttgtccagcagattgcgcaacagcaacgacagcagcaaggtttctccctgacgcggcggcggcgttccccgatgttcatagcgtagcgtcacgcccgccgcatgcgcctgccggtcctgttccgccaaggtcatcgtcaccagattgttccagtcgatcggcgccagttcggccagatccgacagcgaatccagccgcgacagcgtcaacagctgatccaccagccgggtggcgcgatcgatgccgagcgtcagattgtccagcgcgtgctcgcgcatcggcgcatcgtcccccgccagctgcaccacttcggtctgcacccgcagcgccgccagcgggctgcgcaactcgtgcgcggcatcggaggtgaagcgccgctcccgtaccagcaaagcgttgatgcgggcaaacagcgcattgagcgcatccaccagcgggcgcacctcggtcggcacctggcgcgcgtccaacggcgtcgcatcatcgggcgcgcgccggcgcaaaccggccgccaccgcgcgcagcggccgcagctcgcgcccgaccatcagcgcgatcagcagcatcagcaccggcagcgtcgccagccagggcaccagttggccggtcaccatgcccagcgccatatcgcgccggtaatcccactcctggccgaccacgatgcggtagcgcccgtccgggctggtcagccacaccaggcgccagctgtcgtcatcgcctttgcgctcgccgtcggtaaaaccctcacgctccccgtcaaacaggaagtcggcaccgttctcgccgtcgttgagcagcatcttgccctggcgatcgaagatggcgaacgccagcgcgtcgtcgtcctgttcgccgcgcttgccgtgatgcaccagcttcttggttttcggcaggctgcgcgcgctttcatcggccaacagatcgccgaggttggcggtcgccagccgtttggcgaacagcatctgctgggtgtcgaacacttcgttgatggtgttgcgcgacatcacccaggccaccacgctggcggtgctccaggtcagcagcgccaacaggctgaaaatcaggatcaggcgcagccgcaggctgagacgcttcacggcgcatcccccagcgtgtaacccacgccgtggatggtacggatgaaaccgttgcccagcttgcgccgcaggtggtgaatatgcacctccaccgcgttgctgctcacttcgtcgtcccagttgtacagtttctcctgaatcaacggccgcgccagcacgcgccctttgttgtgcagaaacagctccagcaccgccaattcgcgcggcgtcagcgtcaccggctcgccgttgcagctcacgctgcgggtggcgctgtcgaacaccacgttgccgtgcgtcagctgcggcatcagttggccgtggcgacggcggatcagcgcctgcaggcgcgccgccacttcggccagcgcgaacggcttgcacagataatcgtcggcgccgctttgcagcccgctgacccgctgctccagcgcatcgcgggcggtgaggatcaataccggcacgtcctgcccggcctggcgccactcgcgcagcagatccaggccgtcgaggcccggcaggctgagatcgaggatcaccgcgtcgtacggcgcgctgtccagcgcatttttgccgacggcgccgtcggtgaaccagtccagattgaagccgagtttggtcagcccggccttgatgccgtccccgatcagtttgtcatcttcgatcaacagaattcgcatgagtatcccttttgagtcttggcgccattgcaccacaaggttcttaagaaccgcttaagcatggcgatccgcgctacccaccccgatcgggttacagtagaatgactgcacttttttgcagcctgggcctgcgtacgccgcacggcccgtttcaggagacgttgtgatgaaacccaccaccgtgacccacttgcgccagtggaaacaggagcaacgcaagtttgctacccttaccgcctacgatgccagctttgccaaactgtttgaagagcaaggcatcaaagtcctgttggtgggcgattcgctgggcatgacgctgcagggccacgactccacgctgccggtcaccgtcgccgacgtggcctatcacacgcgcgccgtgcgccgcggcgcgccggcctgtctgctgctggccgatctgccgttcatgagttacgccacccccgaacaaaccttcgccaacgccgccgagctgatgcgcgccggcgccaacatggtgaaactggaaggcggcagctggttgtgcgacacggtgaaaatgctcgccgagcgcgcggtgccggtatgcggccacctgggcctgacgccgcagtcggtcaacgtgttcggcggctataaggtacaagggcgcgacgaactggccgccaaacagctgttgcaggacgcgcagaatctggagctggccggcattcagctgctggtgctggagtgcgtgccgaccgagttggcgcgccagatcaccgaagcgctgtccattccggtcatcggcatcggcgccggcaacggcaccgacggccagatcctggtgatgcacgacgccttcggcatcaccggcggccacacgccgaagttcgccaagaacttcctggcgcagagcggcgatatccgcacggcggtgcagcactacattcaggaagtggagcaaggcctctacccggcggctgaacactcttttaactaagcgatggttccaggagtcacccaatgattattatcgaaaccctgccgatgctgcgtcagcagatccgccgctggcgccaggaaggcaaacgcatcgcgctggtgccgaccatgggcaacctgcacgacggccacatgacgctggtcgatgaagcgcgcgcccgcgccgacgtggtggtggtgagcatcttcgttaacccgatgcagttcgatcgcccggacgatctggcgcgctacccgcgcacgctgcaggaagacagcgaaaagctgacccgccgcggcgtcgatctggtgttcgcgccggccccggccgcggtttatccgcagggcctggagcagcagacctacgtcgacgtgccgggcatctccacaatcctggaaggcgccagccggccgggccacttccgcggcgtttccaccatcgtcagcaagctgttcaacctggtgcagcctgatttggcctgtttcggcgagaaggattaccaacagctggcgttgatccgcaaaatggtggcggacatgggttacgacatcgatatcgtcggcgtgccgaccgtgcgcgccaaagacggcctggccctcagctcgcgcaacggctacctgaccgccgaagagcgcaaggtagcgccgcagctgagcaagatcatgaacgcgctggcgcaacagctggccaatggcgagcgccagatcgaagcgctgctggagcagaccgccgagcagctgcgcgccgccggctttacgccggatgagctgtttattcgcgacgccgacagcctgcagccgctgacggtggacagccagcgagcggtggtgctgatggcagcctggctgggcaaggcgcgtcttatcgacaaccagcaggtcgacctgacgctgtaagccgttttttatactgtcgtcaccctaccgccctgaccataggtagacaatggcggggcaatcggtgacgatagagattgcagggatgcaggagagatgttcaacccccagcgcctgtgaaggccgatattcagttaggtaaagctatgatacgtactatgctgcaaggcaagctgcatcgcgtcaaagtcactcaggctgacttgcactatgaaggctcctgcgccatcgaccaggatttcctggaggccgccggcattctggaatatgaagcgatcgatatttacaacgtggataacggccagcgcttctccacctacgccatcgccgccgagcgcggttcgcgcatcatttcggtcaacggcgccgccgcgcgctgcgcctgcgtcggcgacaaactgatcatctgctcctatgtgcaaatgaccgacgccgacgcccgccaacaccacccgaaagtcgcctatttcgaaggtgacaacaacctgcagcgcaaggcgaaagccgtgccggttcaggtcgcctgacaataaaacgggcgccttgcgcgcccgttcttccttattgcaccaccaccgtgcccggcttgttggctatccgatccgccatggtctggatcgagtcggtgcgcagaatatacagccgctttagcgtataggggttatcccccggctttaccttgccctgcaccgtggtcaccgccagatggaaaccggcgtcctgcgccgcctgaatcgcccgttggttatagccgccgaacgggtaagacagatacagcacgtgcggattgaactgcgacagcgcgcggcgtgagcgctcaaaatcaaactcgatattgtgcagtgaacggctcagcaaaatcggctggcgattaccgtcggtgcggtgcaggaaatgggtatgcgactgcacgtcgaacacgtcctgaatctgcttgagctccgagacgctcataaactgcagcgagtccgggttccatttctgcggatggcgtttgatgcgcgaagagatgatgaacgccgtggcgcggaaaccgtaatccttcaataccgggtaagcgtagcgatacaccgatttcagcccgtcgtcgaaggtcagcacgaccgccttgcccggcaggttgatctgatttttcaggtaggcttccagctggtacagcgaaatggtgtcgtagcccgcctgcttcaggtaggtcatctggttgctgaacgccacgtctgaagtggtggtcgaggtgtggcggaagcgtttgttctcttcgtttttcagcaggtggtggtaagtcagcaccggtatgccgttatcgatctcgcagtccaactcattaatgaaccccagccgctcgccgatgttgacctcgtaccaggtgttgttcaggcgatccttcagcttgccgatgatcggatagcgcaggttgccttccagcgtgcccaatacctcgctgtccttgtccgctgcggtgtatacgtcgatcgttttttgcgtgatcagattctggttggtcagcggtttgttcagctcgcccagatcgtcttgcaccttgcgcgacttcttcaattcacgcacgtcgtctttatcgataaagccggtaccgtgcccgaatttgaattcgtagtattccgcatccgccgggaagacttggagcagttgcccgcgcttcacttcccctaccgggatcacatgctcgcccaccaacgcatagacttcgctatcgcgctgcgcttccatgtattcagatttaaccgcgctgtcttccgacagcagactagccaggctcacaggggaaaccaacgacatcagaatgccgagcaacccagccgttaacgtgtattgagaccgcatgatgatgttctgcttacgagtgcgtaatgacaaaagtggaggaaatgtggagcgccagcatagcacgatttgaacagcggggaactagcggttatttgagcaattctattgatttacgcgccgcctgcgccaaatcaagaaaagcgcccccgccgggaaagcgagggcgcgatacgatcagctgcgcaggccgcggccgcgctcgatcaggtaccaggacagcaggtaaaacaccgcgataaacgccaccaacaccgccatggtgaacgccagcggcacgtcgttgatgccgaggaaaccgtagcggaagccgctgatcatataaacgatggggttcagcttggacaccgcctgccagaatggtggcagcagcgacagcgagtagaacaccccgcccaggtaagtcagcggcgtcagcacgaaggtcgggatcaggctgatgtcgtcgaaagtggtggcgaacaccgcattgatcagccccgccagcgagaacaggatcgccgtcagcagcagcgtcagcgcaatcacccaccaggcgtgcacctgcagcggcacgaagaacagtgagatgatggtcaccagtacgccgacgcagatgccgcgcgccacgccgccgccgacatagccggcgatcaccacgtgggtcggcaccggcgccaccagcagttcctcaatgttgcgctgaaacttggcgctgaagaacgacgaggcgacgttggcataggagttggtgatcaccgccatcatgataaggccgggcacgatgaactgcatgtagctgaagccgtgcatatcgccaatgcgcgagccgatcaggttaccgaagatgatgaagtacagcgtcatggtgatcaccggcggcaccagggtctggatccagatgcgcgcgaaccggtttacctctttggcccagatgctctgtaaggccacccaatacaaacgcgtcatgctttctctccattgccgttaaccagggtgacaaacagctcttccaggcggttcgccttattgcgcatgctcagcacctgcacgccctgcgcgctcagctgggcgaacaggccgttcagcccctgctcgcgcatcacctccacttccagcgtcgaggtatccgtcaggcggctgtggtaaccgtccagcttcggcagcgggctcttcgccgccagatcgaggatgaaggtttccgacttcagcttggccagcagccccttcatcgaggtgttttccaccagttccccgttctggatgatgccgatgttgcggcacagcatttccgcctcttccagatagtgggtggtgaggataatggtggtgccctgggcgttcagctctttcaggaagccccacatcgagcgacgcagctcaatatccaccccggcggtcggctcatcgagaatcagcagcttcggctgatgcatcagcgcgcgggcgatcatcaggcggcgcttcatgccgccggacagcatgcgggcgcgctcgttgcgcttgccccacagatccagctgattgaggtatttttcggcgcgcgccatcgcttcacgccgcgtgacgccgtagtaacccgcctgattcaccacgatctgcaacacggtctcaaacggattgaagttgaactcctgcggcaccaggccgagctggcgcttggcgttgacgatgtctttatcgatgtcgtaaccgaatacccgtacgctgccggccgttttgttcaccagcgagctgatgatgccgatggtggtggactttccggcgccgtttggccccagcagggcataaaagtcccccgcttcgacgctcaggtcgatgccgcgcagcgccttgacgccaccggcgtaagtcttggtcagctgcgctaattccagtgcataattcatatgtaaaatagtaccttataacgatgagtatgccgccgcgcccctgtttgcgaggcttgaaacactaacaataatcctagcatcgacggcgttttcactgcgtcgaatccgtgcggtaaatgaggctgcaccactgttccgatttccaaattgtgacgcttaccctatattaccccaacgcaatctgtccgttacgggtcaatcaccttcatgaaagaaatcgaagagcttatcgccaacaaccaggcctggtcggccaatatcagtcaggaagacccggatttttttgaacgtttagcccaggcgcaaaagccccgcttcttatggattggttgctctgacagccgcgttcccgcagaacgcctgaccggcctcgagccgggtgaactgttcgtccatcgcaacgtggcgaacctcgttatccacaccgatcttaactgcctgtcggtggtgcagtatgcggtagatgtgctggaggtcgaacacatcatcatctgcggccacctgggctgcggtggcgtgcaggccgcggtggaaaacccggagctggggctgatcgacaactggctgctgcacattcgcgatctgtggtacaagcacagttcgctgctgggcgagctgccgccggaacagcgtttcgacatgctgtgcgagatcaacgtcattgaacaggtgtacaacctgggccattccaccatcatgcaatcggcctggaagcgcggccagaaggtgatgatccacggttgggtgtacggcattcaggacggccgcctgcgcgatatggaagtgctggcgaccagccgcgagagcctggagatgggctaccgcaaagcgatagccaaactgaagcaggataaaggcgtataaccccgccgcgggcgcggcttgccgcgccccacatccaattactcgtccagcagcaccactttgccgacgtacggcaggtgacggtagcgctgggcgtagtcgatgccataccccaccacgaactcatccgggatcgagaagccgacgtattcgaccggcacctgcacttcacggcgctcaggcttgtccagcaaggtgcaaatcgccagcgacttcggcccacgcagcgccaaaatctcgcgcactttgttcagcgtattgccagaatcgatgatgtcttccacgatcagcacgtctttgccgcgaatgtcttcgtccagatccttgaggatcttcacgtcgcgagtggtggacatgccgctgccgtagctggaagccgtcatgaagtcgacttcgtgcggcacgtcaatcgcgcggcacagatcggccatgaacatgaaggagccgcgcagcagcccgaccagcaccatgtcactgccgctgtcgcggtaatgttcggtgatctggcggccaagttcggcgatacgggtcttaacttcctgctcggaaatcattacgtctacagtgtgtttcatagtattcaggtcagttgccggaagaaaggtgcggagtttagcatagcctttcgccggtggcgacgcgagcgcgccgccacatgagcgccgggccgcgatcattcgtcgacggtaaagcccatcatcatgccggtatcttcgtgttccaacaggtggcagtgggccatatacgcatgttcgctgcttgccggatgatcgaagcgcaccagcacttcgctgcgccacccttcgacgcgcaccgtgtccttccagccgctgcgatgcgccgccggcggtttgccgttttccgacaagatacggaactgggtgccgtgaatgtggaacgggtgcaacatcatgtcgccctcgccggaaatggtccatttctcatactggccccgtttggcggcgaacatcggcttggtcatgtcgaaggccttgccgttgatcatgttgccgtggctgaagtcgaacggtttggctttgccctgcgcgccgccgtgatccatcccggccatcttgccatgatccatgcctttcatgttgccgtgatccatgccctgcatgccgcccttttccatgcctttcatgttaccgtggtccatgcctttcatgtcgccaccgcccatcgcgccatgattcatgctcatgccggccatcgcctggtggccataacgatccatcagcgcctgcatgccgagcatatccagctgcggatccatcatcagctgcagccaacgctcctggatgccggcggtggcaggcaatgtcggcagcttcaccaggctgtccggcatggctttaatgccctgcgccaacgacggctgaatgcgcaacaccggcagcggccgatcgaacggcgccagcgtcatgcccatctgtttcaccggcaacgtcacgatatcgaatgctttcccgtcggaggcatcgaccagtacttcaaaacgctcgcccatcagcatcggcagctcggtcagcttcaccggctccgccaggaaaccgccgtcgctggcgatgacgtacagcggacggttgtcactggccgccagattcagcgagcgggcgttacaaccgttgaggaaacgcagacgcagccagccgcgcggcgccagatgttgaggatactgcgcgccgttggtgaacatgcgatcgccaaaccagcccaccgccgcgctcatcacgtccaggcggtattcgatctgcgcgtctttgcccagccgcttatcctgcaggatcaccggaatatcatcctgcccccaggttttcggcagcggcagtttggcgctttcgtcgtcttccagcagcaccagccccgccagccccatcatcacctggctgccggttttaccgtgtgtatgcgggtggaaccagcaggtggccgccggttgatcaacggtgaaattcaccgtgcgcgtcgcgccgggatggatcagcgcctgcgggccgccatcgacgtcgccgggaatttccaggccgtgccagtggacggtactggcctccgccaggcggtttttgatatcgaccgtcaccggttggccacgctgcagcttcaccgccggcccgagcagcgcgccgttgaatccccaggttttggtcgcggcgccgggcaaccagcgggtttcccccgcctgcagcgccagcgcaatctttccctgcgcgtccggcatcaacagcggcggtaccggcagggccggcctatcggccgcccaggcggctcggctccataacggcaatgcgctcgccgcgcccagcgcggcggttaatttaataaaatcacggcgtaacatcgctgactcccttttctcagtgacataactcaatgccgccagcctaaaccttccccctggcggaaggtcaagcctttcctggcggtattttaagctatgcctcacaatcaagagagtgtgactggcaagcgcgacgccggcccgccggcaataaaatttggtgcctttacagacaagtgtggtaacgtcagcagacgacaaacaggcctatttcatgatgaaaaaaacaacgttatcgatgctgttgctggcgatgctgggcttctccaacgccagtctggcgctgaatgaatccgaggcggaagatctggccgatcttacggcggtatttatttatttgaaaaatgattgcggctacaacgatttgccaaacgcgcaaatcaaacgcgccattgtctatttcgcgcaacaaaaccgctgggatttgagcaactacaacagtttcaatatgaaggcgctgggcgaagacagctatcgcgatctcagcggcatcgccattccaacgcccaagaagtgcaaatcgctggcgcgtgactcgttgagcctgctggcctacgccaattaattctttccccttctcccatccgcttaacgctctctctgtctgaaattcaaccgtgcatcgccaggcagagttagctatgatgttgcgccgatttttcatggctgttattacggagtttcccgcacatgacccagaaagaaatttggtacgaaacgctgcatacgggcttcggccagtacttctcggtagagaaggtgctgtaccgcgagaagaccgatcatcaggatctggtgatcttcgagaacccggagctggggcgcgtgatggcgctcgacggcgtggtgcaaaccaccgagcgtgacgagttcatctatcacgaaatgctgacccacgtgccgttgctggcgcacggccgggcgaagaaagtgctgattatcggcggcggcgacggcggtatgctgcgtgaagtcagccggcaccctggcgtggagcagatcaccatggtcgagatcgacgccggcgtcgtcgagttctgccgccaatacctgcccaaccacagcgccggcgcctatgacgatccgcgcttcaagctggtgatcgacgacggcgtcaacttcgtgaatcaaaccgacgaaacgttcgatgtgatcatctccgactgcaccgatccgatcggccccggcgaaagcctgttcacctcggcgttttatgaaggctgcgcccgctgcctgaatgagggcggcattttcgtcgcgcagaacggcgtctgttttctgcagcaggacgaggcggtcaacagccacgccaaactgagccactactttagcgacgtcagcttctatcaggcggcgatcccgacctattacggcggcatcatgaccttcgcctgggcgagccaggacccggcgctgcgccagcgcgatctgcctgccctgcaacagcgctttaaccaaagcggcctacactgccgttattacaacccggcaattcacgtcggcagctttgccctgccgcaatatttgctcaatgccctgaacgtaacacgttaagcgagaagataaaggaggtggcccaaattgcataagctaaaactgcacggcttcaacaacctgaccaagagcctgagtttttgtatttacgatatttgttacgccaaaaccgcggacgatcgcgatggctatatcgcctacatagacgaacaatataacgccaaccggttaaccgagatcctgagcgaaacctgctcgatcatcggcgccaatattctgaacatcgcgcgtcaggactacgagccgcagggcgccagcgtcaccatcctggtcagcgaagagccgatcgatccgaaagacgtcgatacgtcggaacaccccggtccgctgccgaatacggtcgtcgcgcacctggacaaaagccatatctgcgtacacacctacccggaaagccatccggaaggcgggctgtgcaccttccgcgccgatatcgaggtttcgacctgcggcgtcatttcgcccctcaaggcgctgaactatttaattcaccagctggaatccgacatcgtcaccatggactatcgcgtgcgtggttttacccgcgacgtgaacggcgtgaaacattacatcgatcatgagatcaattcgatccagaactttatgtcggaagacatcaaggcgctgtaccacatgatggacgtgaacgtttaccaggaaaatatcttccataccaagatgttgctgaaggatttcgatctgaagcactacctgtttaacgcggagccggaggcgttgagcgccgccgagcgcaagcagatcaccgatctgttatggaaagagatgcaggaaatctattacggccgcaatattccgcatctgtgatggaaagggcgcggcacgccgcgccctgatgcttagtacttcagcatgaaagaacgataggctttcaacaccagcaggaaatcctcaacgccgcagaatgagaggctttcttcgtcgtaatagttcatcccctcttccatttcatcgccctcgaactccagctgattggcgcggatcatcacttcttcaccgtccatcagcagcgtatattcatggccttccagctgccattgacgctcgctgcctttgacctcggccgcaccggcttcaatgcggtccagcaggttgaaatcgcctttgacttcttcgttgatccagtggccaatcgcttcatgccccatcgaaaatctgacgatcacctgaccggtgacgtcacgcagaaattcgtaatccatagcatgccctcctgagccctttttcttagtgtaaacataaatggcggactaactcagtgagcgctcgcaaagttggcaactgagtaaaataaaacgggaggccaaggcctcccgttaaacagttgcgcaatatagcggcttacacggcggtttggaagatcacgccgtcggctttttcggtgtactgccccagctggtcaaagttcaggtagcggtaggtatccgccgccgtcttgtcgacctgcgccatataggtctggtactcgtccggcgtcggcaggcggcccagcagggacgctaccgcggccagttcggcagacgccagatagacgttggcgccggtgcccaaacggttcgggaagttacgggttgaggtggaaaccaccgtcgcgccgtccgccacgcgcgcctggttgcccatgcacagcgagcagcccgggatctcgatacgcgcgccgctcttgccgaagacgctgtagtagccttcttcggtcagctgagccgcatccatcttggttggcggcgccacccacagacgggtcggcaactggcccttgtgctgatccagcagcttgcccgccgcgcggaagtggccgatgttggtcatgcaagaaccgatgaacacttcatcgatcttgctgttggccacgtcggacagcaggcgcgcgtcgtcaggatcgttcggcgcgcacaggatcggctctttgatctcgttcagatcgatgtcgatcaccgccgcgtattccgcatccgcatcgccttccagcagttgcggatccgccagccatttttccatgccctgaatacggcgctccagcgtacggcgatcgccgtagccttcggagatcatccacttcagcagcacgatgttggagttcaggtactcttcgatcggcgccttgtccagcttgatggtacaaccggcggcggaacgttcggcggacgcatcggtcagctcaaacgcctgctcgaccttcagatccggcaggccttcgatctccagaatacggccggagaagatgtttttcttgcccttcttctcgacggtcagcagaccttgctggatcgcgtagtaagggatggcgtgcaccaaatcgcgcagggtgatgcccggctgcattttgcctttgaagcgcaccagcaccgactcaggcatatccagcggcatcacgccggtcgcggcggcaaacgccaccaggccagaaccggccgggaaggagatgccgatcgggaagcgggtgtgggaatcgccgccggtgccgacggtgtcaggcagcagcatacggttcagccaggagtggatcacgccgtcgcccgggcgcagcgagacgccgccgcggttcatgatgaaatcaggcagcgtgtggtgcgtggtcacgtcgaccggtttcgggtacgcagcggtgtggcagaacgactgcatgaccagatcggcggagaagccgaggcaggccaggtctttcagctcatcgcgggtcatcgggccggtggtgtcctgagagccgacggaggtcatcttcggttcgcagtattcgccagggcgaatgccggcgacgccgcaggcgcggccgaccattttctgcgccagcgagaagcctttgctgctggcggctaccggtttggcgatgcggaacacgtcgctgtgcggcagacccagcgcttcgcgcgccttggtggtcaggccgcggccgatgatcagcgggatacggccgccggcgcgcacttcatccagcagcacgtcggttttcagctcgaagttggcaatcagcgcgccggtctcgtggttgcgcacttcacctttgtacgggtaaacgtcgatcacgtcgcccatgttcagctcggacacgtccacttcgatcggcaaggcgccggcatcttccatggtgttgaagaagataggcgcaatcttgccgcccagcaccacgccgccaccgcgcttgttcggcacgtgcgggatgtcgtcgcccatgaaccacagcaccgagttggtggcggatttacgggaggaaccggtgccgaccacgtcgccgacgtaggccagcgggaagcctttcttgttcagcagctcgatctgtttgatcgggccgacgctgccaggctgatccggcacgatgccttcacgttcgtttttcagcatcgccagcgcgtgcagcgggatgtccgggcgcgaccaggcgtccggcgccggagaaaggtcgtcggtgttggtttcgccggtgactttgaacacggtgacggtgatcttttccgccagctccgggcgcgacaggtaccattcggcatcggcccaggactgcatgatctgtttggcgtgcgggttaccggccttggccttctcttccacgtcgtagaagttgtcgaacatcagcagcgtgtgggacagcgctttggcggcgatcggcgccagcttttcgttgtccagcgcttcgatcagcggatgaatgttatagccaccctgcatggtgcctaacagttcaatggctttctcgggggtaaccaggggggatgtcgcttcacctttggcgatggccgccaggaaacctgctttgacgtaggcggcttcgtcgacgcctggtggaacacggttaatcagcaggtctaacaggaattcttcttcgccttttggcggattcttcagtagttcgaccagcgcggccatttgggtggcgtctagcggcttaggggcgatgccctcagcagcacgctcggctacgtgcttacggtattcttctagcacgacgttctcctcgctctcattgtcatttattgtgcctggcgtatatgcaaaccgggtttataccctttgggtttcactctgtggctaggcgatcggcccgtaaaggccccgaaacggtgattggggcaaacaagcacggtcaaacagcgttacagcatgaaagactgatgggtagagcgcacggcgatattgatgccatctatcctgacggggcactgctgtcgatgtcctggactgtaaggtacagtgcccggttccgctcagccagcatatcaggatttgaaacggttgttaattcgttcacataaaagcaacattaaatctttgctgaatcgttgagcgcagcgtaatcggctgccggactagcagggcattatatccacataattaaaatggatataagcatgaggatcggaatttggcgtcgcggccacaaaaaaccgcgttctgcatctgagcaaaaaaaaaacggccccttctcaggagccgcttgatgaccggtcaaaccagcagaattacttcttcttggctttcgggttaggcagatcggtgatgctgccttcgtagatttccgccgccagacccacggattcgtgcagggtcgggtgagcgtggatggtcagcgcgatgtcttctgcgtcgcagcccatctcgatagccagaccgatttcacccagcagctcgccgccgttggtgccgacaatcgcgccaccgatgatgcggtgagtttctttgtcgaagatcagtttggtcatgccgtctgcacagtcggaagcgatcgcacggccggaagccgcccacgggaaggtggaggtttcgtagctgatgcctttctctttcgcttctttctcggtcagacccacccacgccacttccggctcggtgtaagcgatggatgggatcactttcggatcgaagtagtgcttcatgccggcgataacttctgcggcgacgtggccttcgtgcacgcctttgtgcgccagcatcggctggccgacgatgtcgccgatagcgaagatgtgcggcacgttggtgcgcagctgtttgtcgacgttgataaagccacgctcgtcaacttcaacaccggctttgccggcatccagcagtttgccgttcggcacgcggccgatcgccaccagcaccgcgtcgtaacgctgtggttctgccggcgcttttttaccttccatcgtgacgtagatgccgtcttctttggcttctaccgcggtcactttggtttccagcatcaggttgaactgcttgctgatacgtttggtgaagactttcaccacgtctttatctgccgccgggataacctgatcgaacatttcaacgacgtcgatctgtgaacccagcgcatggtatacggtgcccatttccaggccgatgatgccgccgcccataaccagcagacgctctgggacggttttcagttccagcgcatcggtagaatcccacacgcgtggatcttcatgaggaatgaatggcagttggatcggacgagaacctgcggcgatgatggcattgtcgaagttgatggtggttgggccgttttcgccttccacaaccagggtgttagcgccggtgaacttgcccaggccgttgaccactttcactttacggcctttggccatgccagccagaccgccggtcagctgagtgatgactttttctttccagacgcgcactttgtcgatgtcggttttcggctcgccgaaaacgatgccgtgttcggccagcgctttggcttcttcgatcactttggcaacgtgcagcagtgctttggaagggatacatcccacgttcaggcaaaccccgcccagagtggaataacgttcaaccagaacggtttcaagacctaagtcagcgcaacgaaaggctgcagagtaacctgccgggcccgccccaagtaccacgacctgagttttaatttcagtactcatcatgacctcttaattgattgtccggcgggtcagacgtcatttttattgctaatcgatctcataacgcccttcatccaccgggacgcttacaccgcgagcagtttacagaattgttaataatctgcaaagcgtgttcgagtgacccgtgtctcaacaattttgtcgagttatgcaaaatccgacaaaactgctacagaatcgtcaggggcgcagcatgctgcgccccttttgcattacatcaccagacggcgaatgtcggacaacatgttgttgatgatggtgatgaagcgcgcaccatcggcaccgtcgataacgcggtggtcgaaggacagcgacatcggcatcatcaggcgcggcatgaactctttaccgttccagaccggctccatcgcagacttggagacgcccaggatagccacttccggcgcgttgacgatcggcgcgaagtgagtcgtcccgataccgcccaggctggagatggtgaagcagccgccctgcatctcgcccgcggtcagcttgccgtcgcgcgctttcttggagatggtcatcagctcgcgagacagctcggtgatgctcttcttgttcacgtccttgaacaccggaaccaccaggccgttcggggtatctaccgccacgccgatgttgatgtatttcttcagcgtcagcttctggccatcttcggacagcgagctgttgaagcgcggcatttgctccagagcggcagcgacggctttcatgatgaacacgacaggcgtgaacttcacgtccagcttgcgcttggccgcttcttcgttctgctgcttgcggaacgcttccagatcggtgatgtcggttttgtcgaagtgagtcacgtgcgggatcatcacccagttgcggctcaggttcgcgccagagatcttctggatgcggcccatttcgacttcttcgatctcgccgaacttgctgaagtccactttcggccatggcagcatgcccggcagaccgccgccggcagcagccggggccgcttcagcgcgtttcaccgcgtctttcacgtaagcctgaacgtcttcgcgcaggatgcggcctttacgaccggtgcctttcactttcgccaggttaacgccgaattcacgcgccagacgacgaatgaccggagtcgcgtgcacgtaggctgcgttctcggcgaactcgcctttgtcttcagctttcgcagccggagcggcggctttagcggcggccggcgccggcgcagcgtccgctttagcggctggcgcggcggcagcggcaggcgcagcgccttccacttcgaacaccatgatcagggagccggttttcactttatcgccggtcgcgatcttgatctctttcacggtgcccgcgaacggcgcaggcacttccatggaggccttgtcgccttccacggtgatcagagactgctcggcggcaaccttgtcgcctaccttgaccatcacttcggtcacttcgacttcgtcaccgccgatgtctggcacggcgacgtctttggccgcagaggccgcaggcgctgcagcggcagccggtgcttcagccgcagccggagcagcagcggaagcggcgccggccacttcgaacaccatgatcagggaaccggttttcactttgtcgccggtcgcgatcttgatctctttcacggtgcccgcgaacggcgcagggacttccatggaagccttgtcgccttccacagtgatcagggactgctcggcttccaccttgtcgcccactttcaccaggatctcggtcacttcaacttcgtcggcgccgatgtccggcacggcaacgtctttggcagcagcggcagccggggcagctgctgctgccgccggtttttcttccgctttcgccgccggtgcagcttccgctgcgcctgccgcttcgaagatcatgatcagtttgccggtttcggttttatcgccgaccgccactttgatctctttcaccacgcccgcctgcggggagggcacctccatggaagccttgtcgccttccacggtgatcagcgattgttccgcttcaactttatcgccgaccttcaccagaatctcggtgatttcgacttcatctgcaccgatgtccggtacgttgatttcgatagacattattcagtacctcttaggccagacgcgggttaactttttccgggttgatgtcgaatttcttgattgcgtcagcaaccacagaagcttcgatctcaccgcgtttagccagttcacccagagcagcaaccaccacgtaggacgcatcgacttcgaagtggtgacgcaggttttcgcggctgtccgaacgaccgaagccgtcggtgcccagtacgcgataatcgctggccggcacataagtacgaacctgttcggcgaacagtttcatgtagtcggtagaggctaccgccggcgcgtcgctcatcacctgagcgatgtaaggcacgcgtggcgtttcggttgggtgcagcatgttccagcgctcgcaatcctggccgtcgcgcgccagttcggtgaacgaggtcacgctgtaggtgtcggaacccacgccgtagtccttcgccaggatctgcgcagcttcgcgcacgtggcgcaggatggcgccggagcccagcagctgcaccttgcctttgctgccttccagcgtttccagcttgtagatacccttgcggataccttcttccgcaccctgcggcatcgcaggcatgtggtagttttcgttcagcgtggtcaggtagtagtacacgttttccgggttgtcgccatacatgcgcaccagaccgtcgtgcatgataaccgccacttcgtatgcgtaagccggatcgtaagagatgcagttagggatggtcagagactgaatgtggctgtggccatcttcgtgctgcagaccttcgccgttcagggtagtacggcccgaggtcccgccgatcaggaagccgcgcgcctgttggtcgcccgctgcccagcacaggtcgccgatacgttggaaaccgaacatcgagtagtagatgtagaacggaatcatcggcagatcgttggtgctgtaggaggtcgctgcggccagccaggaagaggctgcgcccagttcgttgatgccttcctgcaggatttggcctttctcgtcttctttgtagtaagcaacctgctcacggtcctgcggggtgtactgctggccgttcgggctgtagataccgatctgacggaacagaccttccataccgaaggtacgcgcttcgtcggcgatgattggcaccaggcgatctttgatcgacttgttcttcagcatcacgttcagggcacgcacgaaggcgatagtggtggagatctctttgttctgctcttccagcagcgagctgaaatcttccagcgccggcatttccagcttctgggtgaactccggcagacgggtaggcacgtagcctttcagcgcctggcgacgttcgtgcaggtatttgtactcttcggaatctttctcgaaggtgatgtacggcagtttttcgatgtcagcatcggcaaccggcacgttgaaacgatcgcggaagtggtgaaccccttccatgttcattttcttcacctggtgagcgatgtttttaccttccgcggtttcacccatgccgtaacctttgatggtgtgggccaggataacggtcggtttgcctttggtgtcctgcgcttttttcagtgcagcgaagattttcttcggatcgtgaccaccacggttcagcgcccagatttcgtcgtcggtcatgtctttgaccagcgccgcggtttccgggtaacggccgaagaagtgctcgcgcacgtaagcgccgtctttggatttgaaggtctggtagtcgccgtccagggtctcgttcatcagctgaaccagtttaccgctggtgtctttgcgcagcagctcgtcccaacggccgccccagatcactttcagcacctgccagcctgcgccggagaagatgccttccagttcgttgatgatcttgccgttaccggtgaccgggccgtccaggcgctgcaggttgcagttgatgacgaacaccaggttgtccagcttctcgcgggtggcgatggtgatggcgcctttggattccggctcatccatctcgccgtcgcccaggaaggcgtaaacggtctgctcagaggtgtctttcaggccgcggtgttccaggtatttcaggaacttcgcctgatagatggcgctgattgggcccaggcccatggatacggtcgggaactgccagaattccggcatcagcttaggatgcgggtaagaggacaggccgttgccgtgcacttcctgacggaagttgttcatctgttcttcggtcaggcggccttcaaggaaggcgcgcgcgtaaacgcccggagagatgtggccctggaagtagaccaggtcgccgccgtctttctcgttgcgtgcgcggaagaagtggttaaagcagacttcatagaaggtcgcggaagactggaaggaagccatgtggccgcccagctccaggtctttcttggatgcgcgcagaacggtcatgatcgcgttccaacggatcgcagagcgaatgcggcgttccagatccaggttgcctgggtaagccggttcgtcttctaccgcgatggtgttgacgtagttgtgcgccgcagcaccggccgcaacgttaacgccgcctttgcgggcttctcccaatacctgatcaatcagaaactgagctcgctcaacaccctcttcacggatgaccgattcgatcgcctgcagccagtcgcgggtttcgatcggatccacgtcattgtttaaacgttctgacatggtggtattccttatctgtctaatggtttgtttggagcctgtcttcctgtgttctgtgccaaaacacacgaagacaggcccatcagtttagttgccgcttaagtacttaactaagtacctcgaacttaacccccgcaggctggtgtaccctgaagaggacagctcttaatccttgcgttgctggagacgccgcagcgatctctcgcgccgagtatgctcccggctgagatccagcaagatttcctcgataaacgccaagtggcgatgcgaggcttcacgggccttttccggctcgcgtgccacaatcgcctcaaaaattccggcgcggtggctgctcacttttgccaacatctcacggcgcgagtagagcaattcaaagttctgacgcacgttctgttccagcatcggccccatgcagcgtagcaggtgaagtaacacaacgttgtgagcggcttcggtcacggcgatttgatactgcatgaccgcatcggcctcggcgtcgagatcgccgctgtcttgagcctgttgaatcacgatatggcagtcgcggatgcgcgccagatcttcatcggtgccgcgcagcgccgcgtaataggcggcaatgccttccagcgcgtgacgggtttccagcagatcgaactgtgattcgggatggtcggccagcagctcggccagcggatcgctgaagctctgccacagattagtttgcacgaaggtgccgccgccctgacggcgcaggagcagccctttcgcttcaaggcgctgaatggcctctctcagagaaggacgggagacatcaaattgtttcgccagctcgcgctccggaggcagtttttcgcctgggcgcagtgtcccctcgaggatcaggtattcgagctgttgctcgataacatctgacaacttgggttggcggattttgctgtaggccatgagtgaattcttctctgcgaatggcgcggagtcaattggtaataccaatttcaaaaacgtgacggtaaagtaacaaagtattcacctcctgtccatacgggccttgatcgaaatcaggttacccgcacattttaacaccccgctgaaaaccccgctgcaaaccggtaacgccgtgatggtattaccatttacgcggcgggttggggatttaacttttaccaaaccttacgcaaggcagagtgcaaactttttgcccgagttttattgcatggttattacgctttaatgaatggctatttggcgagcagcgcaacggcggttcgttcattatttgaacgcagcccaccgttcagatctacgttatttttgcgcattatgtgatttgttgcttatttcatgcactgaatccccccctgccgtcacacaacccgcattttgtttcctaaactgctgcaatcttaatcactcacacgacaaagcaggtgcaaaccgacgcgcataacattattctctgccaaacggtagcggctccgtggaattaatagctataacgccgtaaataaaacaaaacacacatcgtaaccactgctttacaggcaggtgggcattcacaacgacagagggttagattgatggatggtcaacagcatggtgaccagctgaagcgcggcctgaaaaaccgccatattcagctcatcgccttaggtggcgcaatcggcaccgggttatttctcggtatcgctcaaacaataaaaatggccggcccgtcagtgctcctcggctacgccatcggcggcttcatcgcatttctgatcatgcgccagttgggggaaatggtggtggaagagccggtcgccggctccttcagccacttcgcctacaaatactggggcaacttcgccggcttcgcttccggctggaactactgggtgctgtatgtcctggtggcgatggcggagctgaccgcggtcggcatctacgtgcagtactggtggccggagatccccacctgggtttctgccgcggtattcttcctggcgatcaacgccatcaacctggccaacgtcaaagtttacggcgagatggagttctggttcgccatcatcaaagtggtggcgattatcggcatgatcgtgttcggcgcctacctgctgttcagcggcatgggcggcccggaagccaccgtcaccaacctgtgggcgcagggcgggttcttcccgaacggcgtcatgggcctggtgatggcgatggcggtgatcatgttctccttcggcggcctcgagctggtcggcatcaccgccgccgaagccgacaacccgcaaaaaagcattccgaaagccaccaatcaggtgatctaccgcatcctgatcttctatatcggttcactggccattctgctgtcgctgtacccgtggggcaaagtggtcgaaggcggcagcccgttcgtgctgatcttccacgcgctgaacagcaacctggtagcgaccgtgctgaacatcgtggtgctcaccgccgcgctgtcggtctacaacagctgcgtctactgcaacagccgcatgctgtacggcctggcgcagcagggcaacggcccgaaaagcctgctgaaggtcgacggccgcggcgtgccggtggtggccatcggcatttccgccctcgccaccgcgctgtgcgtgctgattaactacctgatcccgggccgcgccttcgaactgctgatggcgctggtggtgtcggcgctggtgatcaactgggcgatgatcagcctggcgcacctgaagttccgcgccgccaaaaaccgcgaaggcgtggtgccgaagttcaaagcgttctggtacccgttcagcaactacctgtgcctgctgttcatgtccggcatcctggtgatcatgtacctgacgccgggtattcaaatctcggtgctgctgatcccggtgtgggtggcgatcctggccgtcggttacgccatcaaacagcgcagccaacgcgtcgacggcgtcaccagccgttgaatcccgcgaccgcgcaataaaatggcccgcagatgcgggccatttttttttgcctgaacgccgcttacttgcgcagcgctttcacctgctcggcggtgatgtccgccggcaaaccgccccaggtcacccgcaggtaatttaccagttccgccacgtcggcatcgctcaaacgctcgccgaagcccggcatgctctgcatgctttcaccgttcgggaactgctgggccggcaggccgtccagcaccgacacgatcaggttcttgccgtccgcctggcgcagcgtggcgttatcgcgcatcgccggcgcgacgtgcggtttgccctcgccttcacgtgcatggcagccggcgcactgatccagatagaccatacgcccggcatcgctgccctgccccattttcaccggcactgccgccggcggctgctcgcccatcagatacagcgccagcgcctgatggtcttccggcgtcaaataacgggtgctgagatccaccaccatatgcatctcgctgaaggccgaaccctgcggcgcaaggccggtgccgaggaagcggctgacgtcctgcggcgtccagccgcgctgcgccagaccgtgcggcgtaatgtccggcgccatgaagcggccgagatcgccgccctgcatcggcttgccgagatccatctgccccagcgcgccgcgcggcgtgtgacattcgccacagtggcccagcacatcggccagatagcggccgcgctgccattgcggcgagctgccctgcgagctggccggcagcggatcctggctgcggaacagcaggttccagccgatcagcgccatgcgctggttgaacgggaacggcatctcgttagccggaatggccacatccaccgccgggcgcgtcatcaggtaagcgtagatgtcgtcggcgtcctgacgcgacatgcccttatacgaggtgtaaggcatcgccgggtacaggtgccgcccgcccggcgccactccctgcgtcagcgccaggaagaagtcgtccttgctccagcgcccgatgccgtggtcggccgacggcgtcaggttgctgccgtaaatcgtgccgaacggcgtttccaacggatagccgccggccaacggcgccccgccgctggcggtatggcaggcggcacagtcggcggcctgcgccagatagcggccgcgggcgatctgttcggcgccggcggtcacctgctgcaccgggccgtcgtaacggcggttttcccgccaccacagcagcgcgatcaccacgatcgccaccagcacaatcaacactgcgagacgttttttcattgcgccgtctccttcagcaggcccggcgttttcagcaccacgtcgcgcaccgcttcgtaatagcgcacgtagccggtgcagcggcagatgtggctgtccagcgcctgctcgatggcgttctccagctgatcgcgggcgatcggctcacgcttgagcttttccacgaaaatggtggcggcgttgacgaagcccggcgtgcagtagccgcactggaagctgtagtgctccagaaacgcctgctggatcggcgacagctcaaccacctccccctgttcgtccaccctggcgtggccttcgacggtgcgcactttcttgccgttgaagaaatgcgcgccggtgatgcaggtgcgcacctcttcgctggtgccgctcgggtgatcgacaatcgccacgcaggcatggcaaatgccctgcccgcagccgaggcgcgaaccggtcaaatcgagatactcgtgcaggaaatcgatcatcatcaagccttccggcacctcgatcgggccgtactgtttctcgttgatggtcagggaaatcggctgggttttaatgctcattgtaatacctcacgaatattttctgcacgaacgggcaaatcacggaaacggtggccggtggcgtcggcaatggcgttgaccagtgcggccacgatcgggatcatcaccacctccgccatgcctttcggcggatcggtttccgacagcgccggcaggatgtcgccgctctgtttccacaccgccacgtcgctggcgcgcggcaggtggtaacggttgaagttccaggtgccgttgcccgggccgtcttcgtacagcggtaaatattcgtgcagcgcatggccgatgcccatcgccagcccgccctgcagctggccggaaaccagttccggcacgatcaggttgccgcactccatgatcgaatggtgattcaacaactccacctggccggtggcgatatccaccgccacttccgccagcgtgccgacggcgctgtagtaggtcactgccgcattgttgcgctgggtcggcgggtagtagacctgcccgcgcgccagcggcttgaattcaccgttggcattgcgcagcgccatgccgtcgatcggcaggcgctcgcttttgccgttcaacgtgaaatcggcctccgcccactgccagcggttgaagacgtgcaccgccgcgccggtgacaccgcccatctgataagccgtcttggccagcagctcgaggctcagcaccgacatgcccgccgccgtcaggccgccttcgacccaacgcgcatcttcgcgccgcaccaccagcggcgccgcctggccgccgccgatgccggcctgccacagcgccatcgccgccggccacaggccgtgatcgaagatcaggcgcgccgcttcgcgggtactgtgcgagaagtaataggccgagttgctggcgctcgacggcgaacagtagctcggcgtccagttggggttggtttgcagcttatcctgctcttcctgcgacatcaggtaaggatcgccgctggtgaccatcggcaataccgaccagtcggtgaccgagaagtgggcttcgtcggccggtttgcccagccactgcgcgcacaataccgactgcgaggtcgacatgccggtgcccatctccgcgccgctgtgatgcagcgtgatgcggccgtcttcgctcagctccacccgggcgaacgaggtttccgccccggtgccgaaatctttctgcacgcagccgaagccgacgccatagcgcttgccgggatggcggctctcaaactcggccttgcgttcggcgcgcttgagccacatctcgtgcttcgccgccttctccagcacttcatcagcgcggatcgcaccggccgggatcgccccctgggtgtttttcatgccggatttcagcacgttgcgcaggcgaaactcgatcgggtcgatcttcagctcggcggccagctcatccaccatcatctcggtggcggccatgctctgtagcgtgccgtaaccgcgcgccgagccggcatcaatggcgcgtgaggccagcccgaccgacgacagatcgcttttcgggaagtagtaaatcgactgggcggcggtcgcgccgaccatcaccaccgaaggggtaaagttgctgcggccgccgccgtccgcggtcatgtcaccgaggaaagactgcatgacgccggtttgcttattcaccgcgatgcggtagttcatgtcgaacgcatggcgcttcagcgccgtctggaactgctcgaagcggtcattggccaggcgcaccgggtggccgtcgccgtacatcgccgccaccgcgccgtaatacgggaagttgtagtggtctttcgaaccgtagcccacggtgtagcacgggtgcaggatcagctgtttcaccggcggattgcgcttggccagcatgcgcggcatctcgtcggccacttcctgcggcgactgagtcggcaccaccagatgcagggtttgcgtctgcgcgtcgaaccagccattggcgttgtccggctccagcgccgaggtgtcgatcgactgcgtggtgtagcggcgcgacattaccagccagtcggccggcggattcgccaactcgtcggcgatcaggcccgcatagcgcatgccttcctgatccagcttgccgccctcgcgcccttccggccacaccggcagatgttttttcatcgataccgggaagatcggcgtatccttcaggctggagaagcgatcgtcgtcgaacggctgttctccccccacccgcacgtaacggaaactgccccagggatcgcgctccagcgggccggtgaccgcgccgtatttgatggtttcctcacggaatttcagcttgtccttggcgaagcggaaacgggcgaagtcgtgatagatcaggatcgccactgcctggccgagataggcaggggttttgccgttcggcagcagcatgtcgtcaccgtagaacgccggaaaggccaggccatcgcgcgccagatcttccgccgtcaccaggcgatcgggctgcagatcgtcccccagcagcgacagatcgaccccctcgaacagccggtcggctttggtcacgcgcagaatgaaggcgtgcgcctgtttctgcggccagtgcggcatgtccaccgcgcggatatcgcgtgcgaacaccttctgccccatgaccttggcgcggccgtcgatacggaaacgcacgcgcttggcctgcggatcccagttgggtgactggaggattttttgctcgaacagcgcggcgtaggcgcggctgtacaggggggcgaggtacacggagacccccgcaatcacggcgcttttgatgaagcggcgccgcgacgggttgaaattgctcataaataagtccttcacgtctttcttgtaattggtttttgttcgcggtgttgttgcgcaaacgctgacgaccttgccgtagacgtcataagcatatgcttataactaaaattatgtgatgattaacaggctgttttcaacaaaaaaacatttacaaaacacaggtagtttgtaggctaataaataatttgcgcaaacgcggacttcaaccatgaccacgggcattgtcattaccgccgccggacgcggagagcgctttattcaggccggcggccagggcaacaaattgaacgccgggtttgccgatgcggcgggcgagcggcgttcgctgttcgagcacaccctatgccaggcgctggcctccggcctgccggtacaggtggtgacccggccggataatctgccggtactggcagcctgcgccgccaaccaggtgccggtcaccctgctcgccagcgcgggcctcggcgactcgatcgccgcaggcgttgcggccacgccgcactggcaaggctggctgatccacctggccgatatgccattcgtcggcgccgacgttttccgacaggtggcggatgccttacggcagcacccgatcgtgcgcccctgttatgcgcaacagcccggtcacccggtcggcttttccgcccgattgcgcaaaccactttgccaactgcgcggcgataatggcgcccgtgggctgctgcaaggcgcagcagtccacctgctgccgcttgagcaccccggcgtcgtgcgggatattgatcttccatcgcaactcccggccagcgagtaaattcacctatgcaacatcttgatgtcaccgtggtcagccaggcgataagctggctgcaacaacagccggtttggttatgcaccgtgctcagcacctatggctcttcgccgcgctcgccgggcgcgttgatggcggcgacccgcgacggccgctacagcggctcattgtcgggcggatgcgtggaggaggactttctgcggcgcgtggccgccggggagtatcaggcggccagccaggtgattcgttacggcgaaggcggcatgacgcccaatgtagcgctgccgtgcggcggcgtgctggacgtgctgatcgagtatctgccggcgggagaagccagcgtcgcttacctgcagcgcatcgccggcgcgctggaagggcatcacgcgttgctcaaacgcctgacgctgcccaacgcctgccacagccttgagcagagccacttcaccagcgccactcaggtcgaacgccggctcgagcagatcaccctgcacatcgcggccgcgccgcgcctgctgatcgccgggctgtccagcgtggcgctgtactgtgccgatttcgccgtggcgctggggtttgaggtgctggtgtgcgagaaccgcccggaggcgctggacaacttcgccgccgagctgaagcccggcgtgacgctgctgcgccagtttccggccaagttcatcgaagaggggggctgccacgccaataccgccgtcgtggcgctgacccacgatccgcgtatggacgatctgacgctgatggaagcgatccacaccccggcgttttatatcggcgccatgggctcgctcagaaacagcgcgcgccggcgccagcggttgcagcagatcgccgagttcacgccgcaggagctggaacgcatccatgcgccgatcggcctgccgctcggcagcaaaaccccggcggaaatcgccctggcggtgatggcggcgatcgtgcagcaaaaaaaccggctgccggccgccgacgggatcaatgcagcggcaccaccggcaccagatgctgcagctccaggtgcaactcctctttcccgctcagcgaatagctgaacaccgtcatgtccggcccgtcgccgcgggccagccccatttcgggcagcacctgcgtgtagatttgaatgatgtgatcattgagcgccaccggcttgccggaatagcgaaaacggcaaaactcgccgtggatctccggcagcggctccagcgccacgccctcacgcagcgggtagtccgccgtcacgcccagggtatagtcgaccctgacccgctcgccgtccggcaccagttgggtaaacgaatagatttgcgccggacgctcgcccaacaaagtgtagaactgcgcccgcagcgcgctgcgctgcggcagatgcgacttatccaacttttcgatatccaggtgataagcgtactgtttgccgtgaaaggcgtattgccctctggcgatgctgacgcgttcgacctgaatatcgccaggctggctggccgccagcgaacgcaccagattgctgaagtcctgtttgcgggcatgacgatacacgctgggcgattcggcgaagtgtttcttgaaacagcgcgagaacgtctgctggttatcgaattgatactcgaccgaaatatcgaggatgctcttctgcgtgaaacgcaaggcgaaggcggcgatgtagaggcggcgagcgcgaatgtaggaagctaacgataatccggtctgcttcttgaacatgcgctgcaggtaccatttcgtatagcctgacttggcggaaacgatatccaacgacagcggattggtcaggttatcttcaatccagaccagcagttccctgatatgattttcctgcgttcccatgtgcttgctgaaaccttctgttgccgatattccattagtcgaattttagtgctattcgcgtagggtatacaggttaaaactcggcgtccagcaagctacaggactttacacaaccccctccaccgcccgcgggcggtggagggggagaggcgattatttcaggcagctggaacactgaccggcctggatcttctggaagaagtcattgcctttgtcatccaccaggataaacgccgggaaatcttccacttcgattttccagatcgcttccatgcccagctcagggtactccacgcactccaggctcttgatgctctgctgcgccagcaccgccgccgggccgccgatgctgccgaggtagaagccgccgtgcttgtggcaggcatccgtcacctgctggctgcggttgcctttcgccagcatgatcatgctgccgccgtgggattgcagcaggtcgacgtaggaatccatacgcccggcggtggtcggccccaaggaaccggacgcatagccttccggcgttttagccgggccggcgtagtagatcgggtgatccttgacgtactgcggcaggccttcaccgcgatccaggcgctctttcagcttggcgtgcgcgatatcgcggccaacgatgatggtgccgctcagcgacaggcgggtggaaaccggatactgcgacagctgtttgaggatctcggccatcgggcggttgagatcgaccttgatcgcctcgccctccccggcctggcgcagctcctgaggaatgaatttacccggattgtgctccagtttttccagccagatgccgtcgcggttgatcttgcctttgatgttgcggtccgccgagcaggagacgcccatgccaaccgggcaggaggcgccgtggcgcggcaggcgcacgacgcggatatcatgtgcgaagtatttgccgccgaactgtgcgcccagccccaggttttgcgcttcttgcagcagttccgcttcgagttccagatcgcggaacgcctggccatgctcgttgccttccgtcggcaggccatcgtaatacttggtcgaggccagtttgacggttttcagcgtcgcttccgccgaggtgccgccgatgacgaacgccacgtggtacggcgggcaagccgcggtgcccaacgtacgcatcttgtcgaccaggtagtttttcagtttgcccggcgacagcagcgccttggtttcctgatacagataggttttgttggcggaaccgccgcccttggcgatgcacaggaacttgtactcttcgccgtccacgctgtagagatcgatctgcgccggcaggttgctgccggtattgacctctttgtacatatccagcgcggcgttctgcgaatagcgcaggttctcttcgatgtaggtgttataaaccccgcgcgacagcgcctcttcatcgccgccgccggtccagacgcgctggccctttttgccgacgatgatcgccgtgccggtgtcctggcaggtcggtaaaatacccttggcggcgatttctgagttacgcagaaattgcagcgcaacgtacttgtcgttttcgctggcgtccggatctttgaggatatcggccacctgctgttggtgcgccgggcgcagcatgaacgaggcgtcgtggaacgcatgctgggcaagcagggttaacgcttcaggggcaactttcagaatttcctggccttcaaattcgctcacggaaacatggtcgcggctcagcaggtaatattcggtatcgtctttcttcagcgggaacggatcttgatagtggaacggtttattcgacattgatctctcacttgcaacatcagctgcgttaaattcacacttgcggcgcgcgacacggcgccttgtcaaaaaactgcctccaccttacgtatttttaatcagtcagttattgcgccaaatcgcaaaataaccgctctttgcgtaaggaattaccacaggcggcgtttcaaccttgctcggtgagaactgcgggtacaggctcatcatgcacgctttattatcccgcagttaacacattgattacaatccatcggcagcgatcgtcttatcaatgtggtgaaaaagcgccggatgcgatttgcgccggggcatattgtcagccgccgcgccattgcttaagctagccgcaatgaacaaaccgagaatccccatcgcgctgcaacaagcggtgatgcgctgcctgcgagaaaagctgcagttggcccgccagcattttgccgtcgaattccccgaacccagcatcgtctatcagcaacgcggcaccagcgcgggcaccgcctggctgcaaagctgggaaatccgtctgaacccggtgctgctgctggaaaaccaacagccgtttatcgatgaagtggtgccgcacgaactggcgcacctgctggtgtttcgccaattcggccgggtagcgccgcacggccgcgaatggcgctggatgatggaaagcgtgctgctgacgcccgccagccgcactcatcgtttcgaaaccgcctcggtgcaaagcaaaaccttcccctaccgctgcggctgcgggcagcaccagctcaccattcgccgccataaccgcgtgctgcgcggcgaaagcgaataccgctgccgccggtgcggcgaaaaactgaaatttcttgctagcgagaacctttagttaaacgatttatacgttaaaacaagtaaatatcgccatttgccactgccgacaagttccgttaccctgcctgcttttccaattttgagctgttttggaatatgcttcgcagaattttgtttatggcggttttcgccgcaggcgccgcacaggcgcacggcatcaataacttctctcaggccaagacggcggcggccaagattaaccaggatgcgccgggcagtttttactgcggctgccgcatcgagtggcaaggcaagaagggcattcccgatctcgccggctgcggctatcaggtgcgtaaaaacgcccaacgcgcgcaacgtatcgagtgggaacacgtggtgccggcctggcagttcggccaccagctgcagtgctggcaagacggcgggcgcaaaaactgcaacaaagacgccacctatcgccagatagaaaccgatctgcacaacctgcagccggcgatcggcgaagtgaacggcgaccgcaacaacttcatgtacagccaatggaacggcggcgcaggccagtacgggcaatgcccaatgaaggtggacttcaagaataaacaggcggagccgcccgcccgcgcccgcggcgccattgcccgaacctacttctacatgcgcgatcgctaccagctgcggctgtcacgccagcaaacccagctgtttgaagtgtggaaccggcaatatccggtgagccaatgggaatgtcagcgcgaagcacgtatcgccaaggtgcagggcaaccacaacccctatattcaacaggcttgtcagcagcggaaaagctaacctactatagcctttatctttcatggcgccgccaacccgcggcgccgtttcgtcaggatcagactacccatgcgcataccccgcatttaccatccgcagccgttgaccgaccgggcggagatcgccctcagcgaggacgccgccaaccacgtcgggcgcgtgctgcgcatgagcgccggccaggcgctgcagttgttcgatggcagcaaccaggtgttcgacgccgaaataatccgggtggacaaaaagagcgtgctggtgcgccttggcgacggccgcgtggatgacatcgaatcgccgctcaacctgcatctgggccaggtgatctcgcgcggcgagaagatggagttcaccatccagaaatccatcgagctgggcgtcaacgtcatcaccccgctgttttccgagcgctgcggcgtgaagttggacggcgagcgtctggcgaagaaaatccagcaatggcaaaagatcgccatcgccgcctgcgaacagtgcggccgcaaccgcattcccgaaatccgcgaggcgatgtcgctggaggcctggtgcgccgagcaggacggcagcctgaaactcaacctgcacccgcgcgccagccacagcatcaacacgctgccgcagccggtggatcgcgttcgcctgctgataggcccggaaggcggtttgtccgccgacgaaatcgccatgaccaccgaccacggatttactgatattctgctgggaccacgcgttctgcgtaccgaaaccacagcgctcaccgccattaccgctctgcaggttcgcttcggcgacctgggttaaaggagaaaagatgattaagctcggcatcgtgatggacccaatcgattccatcaacatcaagaaagacaccagcttcgccatgctgctcgaagcgcagcgccgcggttacgaattgcactacatggagatgaacgatctctatctgcatgccggcgacgggcgcgcacgcacccgcctgctgagcgtgaaggaagacaaggagagctggttcagcttcggcgccgagcaggatctggcgctgcacgagctggacgtgatcctgatgcgcaaagatccgccgttcgataccgaatacatctacgcgacctacattctggaacgcgccgaagttaaaggcacgctggtggtcaacaagccgcaaagcctgcgcgactgcaacgagaagctgttcaccgcctggttcccggagctgacgccggatacgctggtcagccgcagcgccgcgcacatccgcaaattccaccagcagcacggcgacatcatcctgaagccgctggacggtatgggcggcgcgtcgatcttccgcgtgaagcaggacgatcctaacctgtcggtgatcatcgaaaccctgaccgaacacggcagccgtttctgcatggcgcagaacttcctgccggcgatcaaggacggcgacaagcgcatcctggtggtggacggcgagccggtgccttactgcctggcgcgcattcctgcgcagggcgagacccgcggcaacctggcggccggcggccgcggcgaagcgcgcccgctgagcgagagcgactggaaaatcgcccgcaccgtcgccccgacgctaaaagagaaagggctgatcttcgtcggcctggacgtgatcggcgatcgcctgactgaaatcaacgtcaccagcccgacctgcgcgcgcgagatcgaggcggcattcccgatttcgattaccggcatgctgatggacgcgattgaaaagcgcctggcggcgaagtaatgcgcaatgcgggcggcatgccgcccgctgttctgcatggcgcccgccaaagcgcgccttgaaaggcggcgggtatagccgcatactggcggctgtttattttctcacccattgattaccttatactaacgccatgaatttacagcaccattttctgatcgccatgccaacgctgcaggatcctcgcttcaaacgctcggtgatttacatttgcgagcacaatgaagaaggcgccatgggtttggtgatcaataaaccggtggagcagttcacggtagccacggtgctgagcaagctgaagatcatgccgcctgcgcgcgatccggccatcagcctggacaagccggtgttcgccggcggccccctggcggacgatcgcggatttatcctgcatacgccgcgccacggctttggcgccagcattcaaatttcccccaacaccatgatcaccacctcgaaagacgtgctggaaacgctcggcacgccggagcaaccggacgacgtgctggtggcgctgggttatgcgggttgggaaaagggccagttggagcaggaagtattggaaaacgcctggctgaccatcgaagccaacaccgacattttgttccgcacgccgatcgccagccgctggcgcgaggcggggaaccttttgggtatcgacattcgcagcatcgccaaccacgcaggacacgcctgatgagtaaccgcaccattatcgccttcgactttggcaccaaaagcatcggcgcggccgttggccaggagttgaccggcagcgcccgcgccctgccggctttcaaagcgcaggacggttcgccggactggctgaaaatcgaaaaactgctgaaggagtggcagccggatttggtggtggtcggcctgccgctgaacatggacggcaccgaacagcccgttaccgcccaggcgcgcaagttcgccaaccgcctgcacggtcgcttcggcatccagatcgatctgcatgacgagcgcctgagcaccgtggaggcgcgcgccaacctgttcgatcgcggcggcttccgcgcgcttgataaaggcagcgtggattccgcctccgcggtggttatcctcgaaagctggttcgaacggcagctgggttaacccctcgttccctcccccgcgcactcccccaacacgccggcgtcgatccgctgctgcaaaccctgctcaaaggtttgcatgccggactgcgcgccggtttgcaacacgctcgccaactgatgggttttcccttcgcggatcaggttgctgaccgccgccgtcgccgtcagcacttcaaagatcgccacgcgtccgccgccggggcgcctcatcagcttttgcgcgatcaccgcttgcaggctgcccgccagctgggcgcgcacatagggtttctcttccgccggaaacacgtccaccagccgttccaccgcctgcggcgcgctgcgggtatgcagcgtcgccagcaccaggtggccggtctccgccgcagtgagcgccagccggatggtggcggtatcgcgcagctcgcccagcaggatcacatccggatcttcgcgcagcgcggcgcgcaacgccgcatcgaagctgtggctgtcgcggccgatctcccgctgctggatcagcgatcgccggctgcggtgcaggaattcgatcggatcctccagcgtcaaaacgtgccgcggctggtgccggttgatctcgtcgatcatcgccgccagcgtggtggacttaccgctgccggtggcgccggtgaccaggatcaatccgtcggcgcgccgcagcagcgccgggacgatggccggcgccgccagctcggcaagcgaaggcgactgcccggcgatacgccgcaacgcgagagaaattcccgcgctttgctgaaaaacgttggcccgcagccgttccccgctcggcctgtgcagcgccagatcgacctgccccagccgccgcaggctctcgcgctgctgcgcattcagcaatccgtcgcagagcgcttgcacgccttgcgccgtcagcgttggcgccgccgccagcggctgcagttcaccgtcgatgcgcaacatcggcggatgaccggcacaaaggtgcagatcggaagcattatgctttacactaagggccacgaattcatcgatatccatatcactctcccgggtcaataatgagcactatccaacagaacctgcaggatgtcagaaaccgcattgcggccgccgcgcgaaattgtgcgcgggcgccagaagaagttgccctgcttgccgtcagcaaaaccaaacctgtggcggcgatcgaagaagccatcgccgccggccagcgcgccttcggcgagaactacgtgcaggaaggggtagacaagatccggcatttcgccgagtcgccgcaaagcggcgagttggtgtggcactttatcggcccgctgcaatccaataagagtcggctggtggcggaacacttcgcctggtgccataccgtggatcggctgcgcatcgcccagcgcttgagcgatcagcgcccggccgacatgccgccgctcaacgtgctgattcaaatcaacatcagcgacgagcaaagcaaatccggcattgcgttggccgagctgccggcgttggccgaagcgatcgccgcgctgccgaacctgacgctgcgcggcctgatggctattccggcgccggaagcggattatcagcggcagctggcggtattcagccggatgaacgacgcatttctcgccctgcgtcagcgttatccgcaggccgatacgctgtcgatgggcatgacggacgatatggcggcggcgatcgccgccggcagcaccctggtgcgcatcggcaccgcaatttttggcgcccgcgactactcgcaggcctgacacacagacgagggatttgatgcaacatcgcaagattacctttatcggcgccggcaacatggcgcgtgcaatcatcgccggcctggtggcgggcggctatccagccaaatccatcagcgtctgcgccccttcgccgaaaaaccgtgatgcgctggccgcagactacggcatcgtcagcagcggcgacaacgtcgcctgcgcgcgtgaagccgaggtggtggtgctggcggtcaaaccgcagatgatggccgacgtgtgtcagccgctgcgcgaacaggtcgacttcagcggcaagctggtgctgtcgatcgccgccggtattcaggtcagccgtttctatcagctgctcggcgacaagctggacatcgtgcgcatcatgcccaacactccgtcgctggtcggcaagggcatgagcgggctgtacgcgccggcgcaggtcagccagcgggatcgcgattacaccggcgatttaatggcgtcggtcggtaaagtttgctgggtcgatgacgaaaatggcatcaacggcgtgatcgccgccgcgggtagcgccccggcctatttcttcctgtttatggaagcgatgcaaaaagaggccgagcgcatgggcttcgacagccagaccgcgcgcgatctggtacaacaggccgcttccggcgccgccgcattggtggaagccaacccggatacgccgctgggcacgctgcgcgagcaggtgacctccaaaggcggcaccaccgccgaagcgctgcgggtgttcaacgaacgccaactgccggaaaccgtagcgcaagcgatgcaggccgccgtttcccgtgcccaagagatggaaaaattattttaaataaccgcgagttaaggagaaggaccacttcatgctaacgctgactttcctggtcaagaccgttattgatctgtacgtgatggtgctgttgctgcgcatttggatgcagtgggcgcgcaccgatttttacaacccgttctcacagtttgtggtgaagatcacccagccggtggtcggcccactgcgccgcatcatcccgtcactggggcccatcgacagcgcttcgctgctgctggcgttcctgctgatgaccatcaaatacccgctgctgctgctgattcagggcggcgcgatgtcgctcagcccgtataacctgctgttcggcctgatctcgctggtgaagtccgccggctacctgatcttctgggtgatgatcattcgtgcgctgatgagctgggtaagccagggccgcagcccgatcgactacgtgatgtaccaactgaccgaacccttgatggcgccgatccgtcgcatcatcccggcgatgggcggcatcgacttttccgccatggtggtgatcctgatcctctatctgatcaactacctgggcatggatctgttcggtgagatctggttcctgctgtgagtgcagtcactccggtgctggacgggctggcgatcaggctatatattcagccgaaagccagccgcgaccaaattatcggcttgcatggcgacgaactgaaagtcgccatcaccgccccgccggtcgacggccaagccaacgcccatttgatcaagtttatcgccaagcagttcaaagtggcgaaaagcaacgtcaccatcgagaaaggcgaactggggcggcataaacagttacgcatcgtgaatccgcaacagatccccgccgtggtcgcggcgctcatcgaataattttcaaggtagtcatttatgcaaaaagtcgttcttgccaccggtaacccgggcaaagtgcgcgaactcgccgacctgttggccgatttcggcctggacgtggtcgcacaaaccgatctgggcgtggagtccgccgaagagaccggcctgacgtttatcgaaaacgccattctgaaagcgcgccatgcggcacaggtcaccggcctgccggcgatcgccgacgactccggcctggcagtggacgcgctgggcggcgcgccgggcatctactccgcgcgctatgccggtgaagatgccgacgatcggcagaacctcggcaagctgctggcggcgatgaaagacgtagcgccgggccggcgcggcgcgcaattccattgcgtgctggtctatctgcgccatgcggcagacccgacgccgctggtgttccacggcagttgggccggcgaaatcaccgagcaggccgccggtgaaggcggcttcggttacgatcctgtcttttacgtgccggagctgggccgcaccgccgccgagctgagccgcgacgagaagcgggcgatttcgcaccgcggcaaggcgctgaagctgatgttggaagccatgcgcaatgcttaagctgcccccgctgagtctctacatccatatcccgtggtgcgtgcagaaatgcccgtactgcgacttcaactcccatgccctgaagggtgacgtgccgcatcaggagtatgtcgatcatctgttagcggatctggatgccgatctgccgctggccggcggccgggaaatcagcactatctttatcggcggcggcacccccagcctgctgagcgccgaggcgatgcaggccttgctggacggcgtgcgggcgcgcattcgcgtcgccgacgacgccgaaatcaccatggaagccaatcccggcaccgtggaggccgatcgcttcagcggctaccagcgcgccggcgtcaaccgcatctccatcggggtgcaaagcttcagcgccgagaagctgaaccgtctggggcgcatccacggcccggaagaagccaaacgcgcggcgacgctggcgaccgatcttggcctgcgcagcttcaacctcgatctgatgcacggcctgccggatcagtcgctggaagaggcgctggacgatctgcgccaggctatcgccctcaatccgccgcatctgtcgtggtatcagctgaccatcgaaccgaacaccctgttcagctcacgcccgccggttttgccggacgacgacgcgctgtgggacatcttcgaacgcggccaccagttgctgagcgccgccggataccagcagtatgaaacctcggcctacgccaaatcaggctaccaatgccagcacaacctcaactactggcgctttggcgactatctggggatcggctgcggcgcgcacggcaaggtgaccttcagcgacgggcgtatcctgcgcaccgccaagaccaagcacccgcgcggctttatgcgcggcgactacatggacaagcagcatgaggtggcggcggcggatcggccgttcgagttcttcatgaaccgcttccgcttgctggaagccgcgccgcgcgccgacttcgtcaactacaccgggctggcggaaagcgtcattcgcccgcagttggacgaggcgctggccaaaggctatctggaagaaaccgcggagcactggcagatcaccgagaagggcaaactgttcctcaactcgctgctggaacagttcctggcggacgacgagtaaaaaaaagcgctgaataatcagcgctttttttcatgttcaggcggcattatgagggcgatgcgtcacgtcgccacgccccttcagcaatccctcaacggaaacatcctcgtccaacgcatcccaatggatgccgcgagcgctgagttcatactctgcccgctgttcttgcgtcgccttcaacaaacgcggaaaccaggccagtggcacgccaataattcgggcgtcgctcagttcgacccacatcgtcgcatcgtcaaagctgacgcgtttagccgaaatactcatgccaagcctccaaaaacaatgcctgataggtatcaaccagacccgccagctcttttagcgttctggcgttaaagccgtcattacgcgccaactgcacgccaggaaccaaccagaatttcgcttcagcctcagcgtctctgatatgaacatgcggcggctcaagcgggtcaccctcgttggaataaaaaaagaacctgtagcctttataacggaatatcactggcatcaatgcaaaatccttttgccgattgattatagtttagccagtttgtcagatagccgtcgtgaggtcaaaaacgcacggcggctacgcctatccgttacttcaacgccttcagcagatccttgcgctgggtttccagtgcggtgacgcggttgcacacatcatggccgaagttctggaagtcctgctcctgattgttccattcgttctggatcgccttctgcaagccgcccaggttgcccatgatcgcctgcagcgggttaccgccgctgttggcggcctgtttgacgcccatttcgttcaggctgtcctgcagcacgccgcccatgctctgctgcacgatgttgcggccgtcctgttccacctggtcgatcgccttgtggtggaaggtcaggccgtcgctgcggtgctcgatgatgcggttcatctgctgtttcagctggccattcagggtggtcagccggttgcgcacgttgctgttgctgcccagctctttgacgatcactttatccagcgctgcgcgggctttctccaggtgtttctgcgcgccgtcgtcgatccacggcagttgcttgcgcagcgcgctctggtaactgaaggctttctgccgctggctgtcgttcaggctcagcgcctggccgttgcggatcacgtcgccatccggcgagatttgcaggtcgccgctggcgcctttcacctgcacgctctgcgggctgatgatcacatcgtcctggggtttaacgctgcattggtactcggcgtgggcctgcgcggcagtcgccgccagcagcagtaaggctaacccggttttcttcaacatagcttctcctgactcccatccagactgggattaaaaaatcgaacgaccgatacgttgagacaacagttccagcgccgcagttcccgccagcgagttgccggaagcatccagctccggcgaccagacgacgatcgacagctcgtccggcacgatggccacgatgccgccgcccacgccggacttgcccggcattcccacccgataggcgaattcgccggcgccgtcgtacatgccgctggtcatcatcagggcgttgatctgccgggcctgcagcgggctaatcaccgcctcgccgctgagatcgcggccgtgattggccagatagacgaagctgcgcgccagctccacgcagctcatgcgcagcgcgcagtaatggaaataggtttgcagcacggtgatgacgtcgttttcgaagttgccgaacgacttcatcagataggcgatggccgcattgcgatcggagtgttcgaattcggaacgcgccacccgcaggtcataggccagatcgtcttcgccggccagctgacgcaccacctccagcatgcgctgtttgggggcgctgagccgggtttgcagcatgtcgcacaccaccagcgcgccggggttgataaacggattgcgcggtttgccctgctccatctccagctgcagcagcgaattgaacggcaggccggaaggctctttgcccacgcgccgccagatctcaggctcctgatagcgcgtcagcgccagcgtcaggctcagcactttggagatcgactggatggagaagcgctccgcggcgtcgccggcctggaacagttcgccgtccaccgtgcacacggcgatcgccaaccggtcggcgggcacttccgccaacgccgggatgtagtcggccactttcccctggccaatcagcgggcgcacctgttgcaggatctcctccagcaacgcgttatccaatgttgttaccacctcggtcacactccgggcaaaacaaaggcgccgttaaggcaccttagatcaataaaacggcgcggcgcgaagccgcactcatcgggcaagcgcgatcaatcccaccagatatcgaacagatcgctgaccttaacgtcggtcagtttgcgcgcttccagccagtttttcaccagttcgcgatgctcgtcggtgcagtggccgatcttctgcaggcagatcagaccttcccactgcaggtagccgctgccgtcaaacgccaggccgttcggctcgatcacttcatcgatgaaggtatccagcgtgctgtcgatgtcttccaccgacgtgccttcggcaaagcgccaggctacggagaaacccagttcctgaaattcttcaatgtgcaactttttacgtaaacgacgactgcggttcttagccattattctttcctctcaaacatcaagtcccaaacgccatgtcccaggcgctggccgcgtaattcaaatttcgtcagcgggcgcgaatccggacgcggcacgtaatcattatcgctggaaagattacggtagcctgcgaccccgttcataacctctaacatatgttccgcatagggttgccaatcggtagccatgtggaagaccccgccggtcttcagcttgcgcagcaccagttcgacaaacggcgtttgcacgatgcggcgcttgttgtggcgcgccttgtgccacggatcggggaagaacagctgcaccatgtccagcgagccgtccgggatcatgttttccagcacttcaaccgcatcgtggcacatcacgcgcaggttgctcagcttcgcctcgtgggcgtcggccaggcaggcgcccacgcccggcgagtgtacttcgatccctaaaaagttctgctgcggattgttgcccgccatagtcaccagcgaggcgcccatgccaaaaccgatctccagtaccgtcggcgcttcgcggccgaacagcgcagcgagatcgacagcgtcagcctgatactccacgcccatcaccggccaatagttctccagcgcgtgctgctggcctttggtcagccgcccctggcggcggacaaaactgcggatacggcgcatcgcgcggccgttctcatcaaattccggggagatgacgtcattaatcatagtgctttctgtctgtttggctgccaattagggaaacgcgcattatgcaaagatacattggtttagcaagtgttcatcttctgtacccgccgtgcggcgtcggaaagttccggtttacagcatcatgactctatgctgcaatctcgcttcattttctgccggataacgacgctgctcatgatgcaagcacaacaattcgcacaggtggtgcttgactggtaccagcgctacggtcgcaagaccctgccgtggcagctggagaaaaccgcctatcaagtatggctctccgaggtgatgttgcaacagactcaggttgccaccgtcattccttattttcagcgctttatggcccgttttcccaacgtgcgcgcgctggcggaggctccgctggacgaagtgctgcatctgtggaccggcctcggttattacgcccgcgcccgcaacctgcacaaggcggcgcagaccattgtcgcacagcacggcggcgagttcccgacaaccttcgcagaaatcgccgatttaccgggcgtcggccgctccaccgccggcgcggtgctgtcgttggcgctgggccaacactatccgatcctcgacggcaacgtgaagcgcgtgctggctcgctgctacgcggtggaaggctggccgggcaagaaagaagtcgaaaaccgactgtggaaaatcagcgaagaggtcaccccggcgcagggcgtcggccagttcaaccaggcgatgatggatctgggcgccatggtctgcactcgttccaagcccaagtgtgaactctgcccgctcaacgtcggctgcctgtcttacgccaatcacagctgggccaactaccccggcaagaaacccaaacagaccctgccggaaaaaaccgcctacttcttattgctgcagcacggcgaccgcgtgtggctggagcagcgcccggcggtgggcctgtggggcggcctgttctgcttcccacagttcagcgcgcgcgtggatttggaactctggctgcagcagcgcggtctgaaaggcaagcgcctggaacagctgaccgcgtttcgccacacgttcagccatttccatctcgatatcgtgccgatgtggctgtcgctcgacgcggcgggcagcggcatggatgagggcgcgggtctctggtataacttagcgcagccgccgtcggtcgggctggcagcgccggtggatcgcctgttgcaacagctggcgaagcagcccccgatccaacaaaacttatatggcgatagcgccatcgacgaggaattagcatgagccgcaccattttttgtactttcctgcagcgcgacgccgagggccaggacttccagctttatcccggcgacgtcggcaagcgcatctacaacgagatctccaaggaagcctggggcgagtggatgaagaagcagaccatgctgatcaacgagaagaagctgaacatgatgaacgtggatgatcgcaaactgctggaagaggaaatgatcaagttcctgttcgaagggcacgacgtgcacatcgaaggctatacgccgccgagcgaataacgctgttggggccaggcgctggcccgcttcaatcctcttatacttcttccaaacggctttaagatgaagaaaattttagctttgctcgtaatagcgcctttgctgatctcctgttccggcaaaaaaagtgaagaaatcaacgaagcctggatcaaagacaccaacggcttcgacattctgatggggcaattcgctcacaacatcgagaacatctggggtctgaacgaagttctgatcgccgggccgaaagactacgtcaaatataccgaccaataccaaacccgcagccacatcaacttcgacaccggtgccatcaccatcgaaaccatcgccaccaccgatccggccgcgcacctgcgccaggcgatcatcagcacgctgctgatgggtgacgatccgggttccatcgatctctattccgacgccaacgatatccagatcagcaaagagccgttcctgtacggccaggtgctggataacaaaggcgcgccgatccgctgggaatggcgcgcggcgcacttcgccgattacctgctgcagaccaagctgcaaaaacgcacctccggcctgcacgtcatctactcggtcaccatccagctggtgccaaaccacctggacaaacgtgcgcacaaatacctgccgatggtgcgcaaggcgtcggaaaaatacggcgtagacgaatcgctgatcctggcaatcatgcagaccgaatcgagcttcaacccctatgcggtgagcggttcggacgcgctgggcctgatgcaggtggtgcagcacaccgccggtaaggatgtgttccagatgcgcggcaaatggggcaccccgagccgcagctacctgttcgatccggagaacaacatcgacaccggcaccgcctacctggcgatcctgcagaacaactacctgggcggcattcagaacccgacctcgcgccgctatgcggtgatcaccgcctacaacggcggcgccggcagcgtgctgcgggtgttctccagcgacaggacgcgcgcggtgggcatcatcaacggcatgcagccgggcgacgtgtaccaaacgctgaccaccaagcacccggccgccgagtcgcgccgctatctggtgaaagtgaataccgcacagaagagctaccgcagaaagtagcgcttcccgcgtggataggagaagggccggtgcgaaccggccctttttttactgcttgatcatatagccaaagatgcgcttccagccgtgatcttttttctcgatgtagaccccctgcagctccggcgagaagcccggcaggcggttgatgccctcttctaacgccaggaagtagcgctgcaccgcgccgccccacacttcgcccggcaccacgcacagcacgcccggcggatacggcagggccccttccgccgcgatgcgcccttccgcctggccgatcggcaccagctcgacgttgtcgcggataaactccacgttggcgtcctgcgggttcatcaccaccggcggaaaatgatcctgacggaacatctccttttgcagctgcttaacgtcaaagctgacgtacagatcgtgcatctcctgacacagccggcgaatgctgtagccgcggtaacgctgctcgttcttgcggtacaccgtcggcagcaccacgctcagcggcgcatcctcttcgacatagcgttcgaactgcgccagcatctccaccagctgttccatcttggccgggttctccgccggggtcagcaggaacaggatcgagttgagatcgcacttctccggcacgatgccgttctcgcgcaggaagttggccagaatggtggccggcacgccgaactcggtgtattggccggtcgcggcgtcaatccccggcgtggtcagcagcagcttgcacggatccaccagatactgatcctgggcatagccttcgaagccgtgccacgtctcccccggcacgaaggtgaagaagcgcgcgtcgttggcgatcagatcggtatcgtgatcctgccagtctttgcccgccacctgctgcggaataaacggcttcagctgcgagcagcgcgtgagcagctgtttgcgcgtctcgatgcccagcttgacgcagtccatccacatgcggcgcccggcggggccggcgtgcatcttggcgttgacgtccagcgcggcgaacagcggatagaacgggctggtcgacgcatgcagcatgaacgcgttgttcaggtgcttgtggttgcagtggcgcttttgccctttgatatggtcgtctttcttatggatctgcgaggtctgcgagaaccctgcctgctgtttatgcaccgactgggtgacgaaaatgcccggatcgtgctcgtccagctccagcagcagcggcgagcactctttcagcatcggaataaagccttcgtaacccacccaggcggagtcgaacagaatgtaatcgcacaggtggccgatggtgtcgatcacctggcgagcgttgtaaatcgtgccgtcgtaagtgccgagctgaatgatcgccagccgaaacggccgcgccgccgcggctttctccggcgccacctcgcggatctgctcacgcagatagcgttcgtcgaagcagtgcgcatcgatgccgccgataaagccgaacgggttgcgggcggtttccagatagatcggcgtggcgccggcctggatcagcgccccatggtggttggatttgtggttgttgcgatcgaacagcaccagatcgccgcgggtcagcagcgcgttggtcaccaccttgttggccgccgaggtgccgttgagcacgaagtaggttttatcggcgttgaacacccgcgccgcgtgtttttgcgcatccttggccgagccttcgtggatcagcaaatcgcccagcttgacatcggcgttgcacatatcggaacggaacagggtctcgccgtagaaatcgaaaaactgccggccggccgggtgtttgcggaagaactcgccgccctgatgccccgggcaggcgaaggttgagttttccatctcgacgtaggtcttcagcgttttgaagaacggcggcagcagcgcctgctcgtaggcgtcggcggcggcctccagctgcgccatgtagaacggcttgctggcgccggccagcagcgcaaaaaccccactgacaaacggcagatagtccggcgagagatgctcgtccccttccaccgccacgaaggtcggaatgtcgaaccccgtcgcctgcaagcgcgccagaatgcctgcgttcacgtcggcgaccgacaccaccgccgccgccacgtcggtgtagtccgtctgctctacgcgcacgatctggcgcagcgtctcaatggtggcgaccaggctggcgctggtcgcgattttcaattctttcatcatgctgactctcaaacggtgaaggatgagggtgtgccaccggcacggtaatgagataacgcggttatcccggtaaaagcgatacccgggcacggcagcataagcggcgtgcgtgaccggctcatgatcggggatcatcaggcggctatcgggggaactggtcttggcagcgtccgacaggcatcagtaaaatcagggccgcagcgctggctttacgcatgcctaacagcgagcgtcaggcggccttaccgcatggccggcaggcgtattcgggcggatgacgtgcggaggaaacaacggcggaacggtggcggcgtcagatgtctggtgcgcagcagcgcttgagcaacaaaaccagtcatgccaataaccctctggcttataagaagcggaaacaccgtcagggaacggagagtgctaaaatttgcgcaatgattgcatgattcgttgcagggttcaagcgagaatcgccttgattgaacgtccattgattaaagcataattcattgttatttaattgaaaaaccaaaaatcgcgcgttttaagatggtataaatacacgttttatatgcatatttattgaatgcggatatccccccgtcccccgtccctccgggcttactgcctgaaaatagagcaaccgatcggctttgtgacagaaagcgattgacgccatccggccaatacggtttaatgcgccccgttgcccggatagctcagtcggtagagcaggggattgaaaatccccgtgtccttggttcgattccgagtccgggcaccatattcagaagaacccgcctatggcgggtttttcgctttctgggatacggactctccatcgaactgcgttcgattattcggcctaaaggcctcaccctgcgggccagcgctgaagcgctgttcaacgcggcgccagcgccggttgtccgagtccgggcaccctattcagaataacccgcctatggcgggtttttcgctttctgagatacggactctccatcgaactgcgttcgattattcgatcttacggcctcaccctgcgcgccagcgctaaagcgccaccgcatcatccgatggatgtgcaatttcgcattacaggtgcactttctcaaaaggcccacccccaatcctccaggcgtcaaacgagcgcactcatattctccgtttatcgagtgttttttattgtcattcggtgatggaatatagccacgaacctctaacggtatcactttgttaaataaaaacatattggattaaaactaggaacattccgaataaaaacgacattgctgttaattcattcatataaggctatgctgagttttacctattgataagacatttttaacctattccgctgccaacgcgaaataatggaggatccggcgacaatggcaattgatatgtatatgaaagttgaaggaatgacgggcgagtcccaagacagcaatcataaaggatggaccgacgtactttcgtttaactggggcgcttcacagccaggaaatatggctgtcggcggtgggggcggttccgggaaagtgaattatcaagacctccgtattcaagcgcttatcgacaaatctacacccgccattcttaaatattgttccagtggaaaacatgtcgcgaaaatcgagctttccgtatgcaaagcgggcggcaaccaggtggaatattccaaaatcgttctcgaagacgtgctggtgacgcaaaccgattttaatggtgtcggtcaaaatgatgcgatcctggttgattacgccttccaggcgtcaaaagtcaccatgagttactgggaacaaggcagcagcggcactaaaggcgcggaaagcaaatctggttgggatatcaagcagaataaagagagctaagtgcattctggcacctaacaatacgttaatgatcgggtgataaaatcatggcaatggatatgtttttaaaagttgaaggcattaatggcgaatcgaaaaatgcgaatcacaagcaatggatcgatgtcttttcctttaactggggcgcgcggcagcctggcaatatggccgttggcggcggcggcggtacgggtaaagtgaattttcgcgatctgaccgtacaggctctgatagataaagcgacacctgccttattgaaatactgttcggccggtaaacacctcgccaaggtgcagttgtcgctttgcaaagccggtgggcaggaagtggaatatacccgcattactctggaagatgtattagtgactcataccgacttcatcggtgtcgagcacggttccacgctaggcattgaatactcttttcaggccggtaaagtatcgatggaatactgggagcaagcgaagcaaggcaataaaggagcttcggtgcagatgggctgggacattaagcaaaataaagaaagctaatcacattacggtgcatatcgtaatggcggggggattatggcatttcctaagtcacatgaaattttagctctgacatcgcaacacgaatcgaataatcgggtgtcagccaactttttgacccgtgagattttgaatgaggcgctgatcctcgtcaggtctctgtcaccagaagaagtctttcgattaacaaaaacggagaccggccagatcgcgtttacgctgggtgaactcaaagatgaaaacaaccgccgattgacagccaataatattgagtcaggacaacgaccaggtggaagaattaatcacctggataaccgcattaatgtctcttttcccggaacctcatggcaaatgggagcgcgtgttcagcattttgagaatatcgcgtcgagtaccgtcggcggagccggtctggttttgatcgcgggattatggacgggggccggttctggcgttggcagcattttaggcagaaatgccgcccagctcgcggtagtgactggcacgtatttgggtaaacgcttcgtgaccaataaaaccatggtcgtgaatcagatggcggcgcatatcaaaaaccttgccgatatgtttaactccacccacaacgcctttaatgatttcaagttcgaaagcgcagccaagcgcgcacaatacagtcccgatcctcaggcagagcaccctattacttttgaacagaaagtcacggataacaatgcagttcctgctaatcataccgatgccattcaggctatcgtgcgccgttttgtgacgggaacttaccaacgtgtagatatcgtcggccagggcgatatgtttataaaagtctttttcagcgatggggaactggacatttcgcaagcccagtatgactacctcagcaatttgaagctcccgtgattgatcaacctggcaggtcttcgcggttctggcgcaacggttgtcattctgtccagggtgcaaaaatgccccgaactgacggaaagatttttattgtcggtaagaatggtcaatgacgatgacaaggcagactgccggatcggacgcgatcgttgcgccagcgtggccagttttttcacactcggctcgagcaagcgccctctccgggcagtctttgtccggcattaattaaacgaaccctacccccggtagttaacgcgaaccctccgcgtccatagggtgcaactcggggtaaaatattgccgttcggggggcaacaagaggagataaaggtacagaagtgtgcgtatcaccttagtggaaaagtgtgatgccctgccgcaaaaaaaaataaagcattgaattaaatgataaaaattaacttacaacgcacggatttcataatttcacttccgatttcatctttgcaaaaagcatcctgcctctaatatcacgttatttcaccttccccgcgcctattttaaggctattctaagcaacgaatacaccgagcccggcgtgcaatggcatatacatcagaaaagcagataagaactcatacggtgggcatcctccctggtggccgttttcatggcttgatgaatcagggggacatcggaattttacttaggaatattcattaaatacacgcgcaaaccttcatagggattttcatggaaagaaatacgcccgtagcctttgcctgatgcgctacctaatgctaaacgggcatttaaaattgcggtatttttggcccgtacaccttttaattacatttaattcgtgaagcttacttataagaaaaaggcagcctggttgctataagccaccctatctgcagtcgtatttctgggtattattctcattatactggagcttattaatgaatcagcgtttggatatcatcggtattggccttggcccgtcgaatcttagcctggcagccttaggaagtgaaatagagggatttacgggacagttccttgagcgcaaacctcatttctcctggcatccagggatgatcctggcggattgcagcatgcagaccaactttttaaaagatttagtgagcgcggttgccccaaccaatcgctacagctttctcaactatctggtaaaaaacagaaaattttatcgtttcctgacgacggagcagcgcaccgcatcgcgcgaagagttcgccgattacctcacctgggccgccgccgggatgggatcattggcattcaatcaagacgttcagcgggtcgaatttgacgatcggcagcgccagtttgtggtgaccacctcgaataaggtcttccacgccaaacacgtcagcattggcataggcaagaaaataaagttgccggattgcgtgacgacgcaaagcgatcgctgtttccatgccagcgaaatgatgctgcgcaaccccgatctgaccggcaaacgcgtggcgatcgtcggcggcggccagagcggcgcagatctgttcctgaatatttttaaaggggaatgggggcagccggcgcagctcgactggatatcgcgccgcaataactacaatgcgctcgatgaggctgcttttgccaacgaatacttcacgcccgattacgtcgagagcttttactcactggacagcgcggccaagcggcatatgctggccgaacagaagatgacctcagatggcatcaccagtgagtcgctgctggcgatttatcgcgccatgtaccaccgcttcgacgtcctgcgcgagaaattatgggtgcgcctgctgcccagccgttcgctgacggccgtgaaacacacgctggataacgcctaccaactcgaaacgcgtcatcatctcgatcacggccaggaaaccttcaaggcggacgtggtgatctttgccaccggttatcaatcggcgacgcctgagttccttgagcctttggcccaccggttgttaaagactgcggacggtgaataccgcatagccccagactttacctttgagtgggaaggcccagcggagaactgcttatttgcgatgaacgccagtatgcataatcacggcattgccgatcctcagctgagcctgatggcctggcgatcggcccgcattcttaatcgggcgttagaccacaagccatttgatctgggaacaacgccgacagccattcaatggcgcagtgaaagcgtaccgcccgcgttttaaatacaagaacgtcttaatcattgtcactatgctttgatggaattacgtatatgaagagacaattcaagaagtttattctgaatcagctggccgtattagcccccgagttcaaggcccgattgatatacaaaagggcatttggcaaaccgctgaatttacagtcgccctcaacctggaatgaaaaaataaatcatcttaagttgaatgactacagtaataacgcattagtgactcaatgtgcagataaatatgcggtgagagagtacatcaaagaaaagggatgcgaagagattcttaatgagttgtatttttcctgtgattcagtgcaggaaataccgtgggaaacgctgcctgataaatttgtcattaagggaaaccacggttcagggtataatttaatttgccaaaataaacaatcgttgaacattaaaagcgcctctcatctgatcgatggatggatgaaagacgattactggaaaacctatgtagaactcaactacaaagggatacaaaaaaagatcattggggaaaagtatatcgaatcgaccaatggtcacgggcctgaagactataaaatctattgtttccgcggtgtgccttactgcaccttgctgtgcgtcggcagggataccgggacgccaaaatattacttcttcgacaaagagttcaagttcctttgctatagcgaagactgtctggcattgagccaggaggagatagacgctttcgtgaaacctgagggatatgatgagctgtttgagtacgccactcgcttgtcggcgccctttgagtttgttcgcgttgatttctacatctcgcaaggccagatcatttttggcgagctaacctttaccccctccgccggattggatacggatattttgccgccgaccgatattttgcttggcaagatgctgacgctgcagcagcactgattttcaccggacgcccacagggaagatcgggcggcgcagtgcccagcgcgagaggaataccggccgacatgttcgcaacctgccggccggtattgccctgaaggtatcgggcccatgatctcgcttgttcataccgccgttacagaaaaaccccgccacctatccctgatagcccgcaaccggcccaggcgcaataccttagccggaccacataaccatttgaaaaataatggcattaaatgatcaataagaatcacttacatatttataataaaatgttctatatgtataggaagctataatataagataccggaaagtttccctggtgttgttgtgtgtctttgccctattttatagggctttttttgctaaaaatcgttgataaccgtgtatttcccccgctattcgccattcccctccccataaaaaccataaccatttctaattaattgcaatctctcttattcctgacttaccaataataacaatgagttgctattaacccggcaaagcaactggcggccctcttccgggttttggccgccattcgcggccggaatgtccgccctaaaggtaggtttttgccgggcgcgaacggatgctactatcggccttttgccgaaggtgttaacccgcatgtttttgtccaaccggcattttatctctgcgcttctggcgctcgccatcggcttttggctgccgggttccgtgctggccaggcccgatttggaacgcaagatcggcactaccgtagccgatagcgattctgcggattaccgcttcagcgacctgcgcttcacctccgccgatggccgacggcattaccgcgttcgcatcgcccaaccgcatcgggtacctgagccgggcggctatccaacggtttatttcctcgacggcaacgcggtgctgatggagttaaacgccgccttactggccaaattggcagcggcgaagcggccgccggtgctggtcatgatcggctatgacaacgatctgcgcatcgatgccgccggccgcgcctacgactatacgctccctctgccggcaggcatgaagacaccgccgcgggccggcgggggcgcggatgcgttcctgcaattgattgaaactcggatcaaaccggcgatcgccgccagactggcggtcgatccgcagcggcagacgctgtgggggcactcctacggcgggctcttcgttctgcacacgttgtttacccatcctgccgcctttcagcgctatatcgccgtggaaccctcgctgtggtggggcaacggcatgatcctgcaagaagcgcagcagatgacggaacggcgcgcggcgccggcgataaggctgcaactgtgggttggcctggcggaacgcgatcgcgcggccccgcccggtgtaaagagccccgctctgccggcggacgcaacgcatttgctggccgaacagctggcgcagctcgacggtttcaccgtcggctatcgggaatggcccgccttagggcacggcgccatgctgggcgcgaccatcgagccggcgctgggcagcgtcatcgcagaagactgaattcgcggctcagaaggcatcggccacattttcatctgcagcgcatatcttctgataagaagagtgtttaatatctgagacagagaacggtggccgcgggcgggcgcgtcaaaaaacaaagtggctcccccgtcggcaagtgagcttgctctatccggtggagccatacagtactgcagttttcccggtggggccctggtgaggcgcaagtaggaaaagatggtgtaagcagggcatttcagcgttttaataccgcctgtttcactattttcttctccctgtggcgcctatcataagcgcccgttcaccaggcggaaaagggtgaaaaccacccttgaaatacattaacgaaagtgatattagaagcggttggggcgaaagcgcctagttcagttttgaataattaaatcagggaattatattaaaaatgaatattaatatcaccgacaaacccaacccgcaggatgaagagttcgttatcgacagcctttgggcgcacaatcacaaaacccagcccgtagacattcacccgctgttcctgaccgttaccgacgacaaccagcagatcgtcggcggcctggtcgcgcgcacctggtggggcggcctggaagtgcaatatctgtgggttggcgatcaatgccgcaaaagcgggtatggccgccaattgatggagttggccgaagaagaagcccgcaagcgcggttgccatatggcctatgtcgataccttcgatttccaggccagaggcttctacgaaaaattgggctaccgggtctacggcgagctgggcgactatgcgcatcgccacacccgccattatctggctaaaagcctgtaacgcggcctgagcggcacagaggtgggtatgggttcatcacataaaaataatgaatcttattttaagggcctcatcaccatgatggagcacctgagcgaaccctggggcatcaaagaccacctgtcccgccacctctatatgaaccgcgccgcttatctctataccaatacgccgctgaatttcgacgtcgccggcaaatatgaccacgagttccccgccgactgggccgactccgccgccgactttatcgagcatgacaaaatgaccgaagcggcgcgcgatcgggtcacggtcatagaaacgcactactggtacggcaaagacagcctgacgccgtttatcagcgaaaagctgccggtgtacaacgatgacaaacaggtgattggcgtgatctggaacgccaagccgatgaacagcctgtcaccgctgaagtacatcaatcagcaaaaacccagcgtgttgaccaccgaagtcaataacgagctgttcacccgtgccgaactcgatgttattttccttatgctgcaacgatttacggtgaaagagatcgccaaaatctataatgtcagcaataagaccatcgaaaaccgcatttataacatttaccagaaggccaacgtgcatactcagcagcaatttgaggaatactgcaaatacgccaatctggataactacattcccgatcgcctgataaccaaaggcattcagtttatttgaaccgcaaggaagatctcaccgtgataaagatcgaagattatccgctcacccgggtgccgcaggataaacgagtttcgtttttaagcgtggccatcgtgcatatgggcatgctgaccgcactggaccagttcatgctcggcgccgtactcggcaattccatgacgctgattgacgccttcaccgccatcttcgtcggcagcctgatcttcggcgtggtgacctacggcctggggctggcgggcatgcgcgaaggcatttccggcagcctgctggcgcgctggtgcggcttcggccgtctgggctcggtgctgataggcgtggtggttgccgtcagcctgctgggttggttcggcattcagaacgccattttcgccaagtcgctcgacttcgcgctcggcaataagctgggcttcggcctggccgccgggctctcgggcacgctattgaccatcctggtggcattcggcttcaaggcgctgcgcatcgccgcccgtatcgcggtgccgatgttcatcatgctggtggcctatatttcggtgaccgcgctttccggccataacctgcaggagatcatccagctggcgccgccgggtgaaccgctgaccatcagcgccggcatcaccatcgtcgtcggcggcgccatcgtggccagcctgatgacccccgatctgacccgttactccaaaaacggcaagcacgtgctcggcgtcacgctcttcaccattatcgccggcgagttcgtggtgaacggcctggcgatcctgatcgccaaaaccctgggcaccgcggatgtggtcaccatcatgtcgcaagcggccggcggcgccggtttgctggtggtggtgttctccaccctgcgcgtcaacgatctcaacctgtactcttcttcactgggcatcgtcaatgcggtggaaggcatcaccggcaagaagctgaagtacacctacactacgctggtgatcggtattctgggcaccaccctgtcggtgctgggcattcttgaccgctttgtcgactttctgacggtgcttggcgtggtcttcccgccgattatcggcatcatgctggtggactattatctgctgcgcagccatcgcaagatcctggatgagagccgccggaccggccagctgccgaacgaaacgccaactatcggctgggcggcgatcgtcgccagcatcgccggcggcgccgttggcctggcaaccgaatggggcgtaccgaccatcaattccctggtcgctgccagcctgctgtattggctgcttaaactggtcttcagccgggcgcaaaaaccgctggcatcacagaaatcgctctgattttcgtgaacgcggtaatgcactcctccgataacgggggagtgttagacgctcgaaaaggggattcaatgcaaaagaatgagccgatcgcgcagacaaacggccatggtgattagggtccctggtgtcggtagcaagctatccattatgctcagagtgtggcaacgccccctctgagctttttattataaaaactgtcggcttccgtgttttgatcgtaaagagaaacttcagcttgcatgaacagtagcccatgaaatcggctttggtcaacataaaagtaaacataaaaccggcttttgtgttcacttttccataagaaaaacctaatcaattgatttgcacggctttatctttcgcgcagaggaatcagaccgcctccgctgatatcattgcgctaaacggctgacggaaaacaataattactgctaataatcagttcgttacctgctcgcctgcgcctttttatctggacaacgccactgcgtaagatatagtgaagcctgcgtaatgtttgtaaggacagccaatgaaaaccaccaacgcacagcgcaaaatcaacatcattaaaaatattgaatatctgatgcgtacccgcggtgaaaccaaggcttccttttccaatcgcagcggcctgacgcgtacgactctctacaaaattcttgacggaagagtgaacaacgttcagcaatccaccgtgaataggatctccgatttcttcggtgtctcctgtgaagagatcgaagattacgatctggaaaagctggagctgcttaacgaaacgctgtccaccgaaggcaacaagaacccttccgccattccggtaatcccgcagtcgcgctatctggccgtctcgcagcgcaagatcgggcaactggtcactgagttccctttgacttatttcttcggcgatgagtcgaacatgttggcaatgaaaatagagaccgaaattaaagggtcatttattcccggcgaagtcatcatcatcaaacgcccgccggtactgatttgcgattcgcctttgctgtatcactcgggaaaaagcggcttctttgtggttgacgacaaagacagcgaaagcatggacaaacgccctcaggacaccgtgcaattcctgggttacatcgttggagaaaggctataaatggaaccgaatcagaagttcaagctgttgggcttcacccggcatggcaccatcgcggccaatgtcatggtattggccaccggcaaaaccatcaccatggggctgaatgagctggccgacagcgaaatatcagaagatttaagccggcatgagctgcaggcgctgtaccgtaaactctatggtgacaaccaacaaaaaaccgcctacgagctcagcgatcgccatgaacgatcctggtacgcctacctgattattaccgtggcgctcagcgtgatttatattttctcaacgctgtgcggcgtcaagccgatccaaatcccggtgctgaatctcatcacgccgccggcgatcttcatttacccgctcacgttcattctggtggatatcctcaacgaattctatggcttacgtctggccaggcgcaccatcatcatctcgtttatcgccaatctgaccttcgtcctgggcgtttgggtaacgacgctggtgccgagcattccgcagtgggagtacagcgagacctacaacggcatcgtgcacagcatcatggcggtgctggtggcctcgtcggcggcctatctgatctccgaaaacgtcaactcctacctgctctgcaaaatcaaagagttgaccaattcccgctacctgtttgtgcgcgtgatcaccagcaccgtagtggcttcggccatcgacagcgtggtgttctgtacgctggcgttctacaacgtgctgagctgggacatcatcaaaaccatgatcctgtcgcagttcctgatcaaggtggtttacgccctgctgggcgtcgggccgatctacgccacccgcagtctgtttaatcgctacatcaataccgaacaagcaaagggcaatgaatatgcatatccaaaagcaagataaaatcacccatcttggcgcgaactccgattatccggatcaatatgctcccgcattgctcgaagccttgccgcgtgcccgcggccgcgatctgatcggcgtggacgagcggcagctgccgttcagcggctttgatctgtggaccgccttcgagctgtcctggctcaacggcaagggcaaaccggtggtgggcatcggcgaatttaccttcccgcactcttcttccaacctgatcgaatccaaatcgttcaagctgtatctcaacagcttcaaccaaacgcgcttcgacagcgtggaacaggtgagcgccgccatgcagaaggatctgtcgcaggcggccaatggccaggtcaccgtcaagctctatccgggtctggaaggttatccggcgcaaatcgatcgcctgccgggcatcaacatcgacgatctggatatcgcggtcgacgacttcgccttcaaaccggaatacctgagcggcgcggccgagagaggggaatcggtgtcggagacgctgtcttccaatctgttgaaatccaactgcctggtcaccaatcagccggactggggcagcgtggtgatccactatgaaggccgccaaatcgatcgcgaaagcctgctgcgctacctgatctccttccgccagcacaatgaattccacgagcagtgcgtcgagcgcattttcaacgacatcaagcagagctgccgcccggaaaaactcagcgtgttcgcgcgttacacccgccgcggcggcctggacatcaaccccttccgcagcgatttcgaaacggcgccgacgctcggccgcctgatcagacagtaagcctcatccccaatgctcccgccagggagcattgtttctctcgctttcatctccctgttatttttcgccattatcgtcgtcagcggctatcttcaaagcacactgacggagattaacgacgcatgcctgacctttctcgcagagacatcctgcgggctgccgccatcggatcggcgttctcgctgttgcccgcctcgattcgcaaagcgctggccattcccgccaataaccgcaccggtaccctgcgcgacgtcgaacacgtggtgatcctgatgcaggagaaccgctctttcgaccactacttcggcaccttgccgggcgtgcgcggcttcagcgatcgctttaccattccactgcccggcgatcgcctggtctggcagcaacagggcgccgaacggctggtgctgccctaccatctggacagcaaacgcggcaacgcccagcgcgtcaccggcacgccgcactcgtgggtggatgagcaagccgcctgggatcacggccgcatgagcgcctggcccacctacaaaacgccggcctcgatgggctactaccgccagcgggagctgccgttccagtttgcgctggccaacgctttcaccctgtgcgatgcctatcactgctccatccacgccggcaccaacaccaaccggctgttccactggaccggcaccaacggcccatccgccgccgacgtggcggtggtggtcaacgaatgggacagccccggtccggcggaccgcggctaccagtggacaacctatccggaacggctggaggcgagcggcgtcagctggaaggtatatcaattcctgccggacaattttaccgacaacccgctggcgggttttcgccaataccgcgccgccagcattcaggtgggcaacccggcgtggccgccgaaagacttcaacgctttcgtgccttatagcgatgcgctcaacgaggccgcaccgctgtacaaaggcaacggcaacaccctgccggccgccgacggcaacgatctggacgccatgctggccggattccgcgccgacgtgcagcagggcaaactgccgcaggtcagttggatcatcgcgccggcggcctattcggaacaccccgatccctccagcccggtacagggcggctggttcacccaagagatcctcaacgcgctgaccaacaacccggaggtgtggagtaaaaccgttctgctggtcaactacgacgaaaacgacggcttttttgaccatatgccttcgccttccgcgccgtcgctgcgcgaagacggcagcttcgccggtaaatcgacggtgccgttcgacaccgagatcttccagcacgtggcgccacccggttcgcaggatcaaccgccgccggacggccgcatctacggccctggcccgcgggtgccgatgctggtgctgtcgccctggagccgcggcggctgggtcaattcgcaggttttcgatcacacctcggtgctgcaatttttggaaaagcgctttcaggtgcatgaacccaacatcagcgcctggcgccgcgcggtgtgcggcgatctcacttcggcgttcaactttgtcgatcctaacggcgaagcgctgccgagcctgcccgccaccagccgccacgccgccgacggcctgcgccagcgtcaggaacagctgccgcaagtgccgctgccatcgcccgcccaccagcgtttaccccaccaacgccgcctggcacgcccttcccgcgcgttgccctaccagctgcacgtcgaggccggcgtcgcggccgagcaacgccgcgtgacgctgaacctgttcaataccggcgagcagggagcggtgtttcacgtctacgaccggcgcgatctggcgcagatcccgcgccgttttaccgtcgaggcgggcaaggcggtcagcgacgactggcaaacggagaatgagtaccatctgtggctgcttggccccaacggctttcatcgtgagttgcgcggtgccctgagccggccgcagccggaggtgcgtttgcgcccgacgggccgcaacctgctgctgcagttgaataacccggcccccgaagcgataacggtcaccctcgaacgctgcccttacacgcagcaaggcccgtggcctatcacgctgcctgcgggcggcagccatcagcaagcgtttgacgcccgcgccagcggcggttggtacgatattacgctgcaaagcgccgggggctggctgcgtcgcctggcggggcggctggaagatggcgaacacagcgtcagcgacccgctgatgggccatgaataactatcggcatcgagggagttcaaaaatcgaaaggatatcgcttatcattgcgctctcgttcttcgccgattacccaaggatcttcatgcccgctgttcttatcgccaaagccggccgctggttggccgcctgcgttttactgttggccggcgccgctcaagccgcgccgatcgtcgtcaccgatgtcgccggccgccaggttacgctgccgcaaccggccaagcgcgttatcctggccgacgcccgcgcgctgttggcgctgaatattctgcatccgcaggagccgctgaaaaacatcatcgcctgggacaactcgctgaaggtcaaagcgccggatctggttgaagcctacgcaaaaaaattcccacaggtcatgcagatccccaccttcgacaatccctacaccagtgacttcagcgtggaaagcgcggtggtgcgtcaaccggatctgatcattttcgacatcggtctgctgagcaaattgaaggacagtggcgtactgacccagctggaaaaagtcggtattccggtgctgatcatcgattttcgccagcagccgttgaccaacaccgtcgccagcatgcagctgctgggtaaagtgtttgatgaacagcccaacgccgacgccttcatccgtctctatcagcaacggctcgacttggtgcgccaacgggtcgccacgctgaaaccggagcagcgccccagcgtcttcatcgagcgcagcgccggcatcaaaggcgaacagtgctgcaacaccttcggcaaaggcagcttcgggcagttcatcgataccgccggcggcaataatatcggcagcacgctgttttcagacatgggcggtgaagtgaacgtcgaacaggtgatcagcagcaacccggatttctatctgctgaccggcgccgactggagccgcggccatcgcggcacgctggcggtgccgctgggttacgccaccgatatggccaccagccaaaagaaactggcgcacctgctggatcgcaccggcattaacgtgctgaaagcggtgaaagaaaaacgcgtgatggcgatttaccatcaattttacgacacgccgctcaactttatcgcggttgaggcgatcgccaagttcctgcacccggcgctgtttaaagatattgatccgcaagcggatatcgaaatggtgcaccggaaattcaccgcgctggattacagcggcgtcttctggcttacgccgcaataacccccgccagggcccgccagccgggccctgtttcccgcattcattatttagttacccgcttaactatcccgtaacaattctatttacttgccaataattatcattaagattgtcttttctaaaaaaacacatccgggtctgaaactcttaaggcattattatgtcacctctttttcggctttctctgctgacggcttccatcgccgtcgcattccctgtccttgctactgataactcatctcagaacgataccgacaccgtgaccgtcgtcggcaactggctggacaaccccgataccagttcggtgctgctcaaccatccgggcgcgcgttccatcgtcacccagcagcaaatgcacgaacagggcgaccaaaccatcgccgatagcctgcgcggcgtacccggcgtgcaagtgcgcgacagcaacggcaccggcggcagtgacatctcgcttaacgtcggtgtgcgcggcctgacttcgcgtctttctccacgctccaccattctgatggacggcgtcccgctggcggtcgcgccttacggccagccgcagctgtcgatggccccgctgtctatcggtaatctgcaatcggtggacgtggtgcgcggcggcggcgcggtgcgctacgggccgcagaacgtcggcggcgtgatcaacttcgttacccgtgacattcccaaaacgtttggcggcaccgccagcgtacaaacccagggcgccagccacggcggcctgaagaccctgaccagcgcctccgtgggcggcaccgcagacaacggcctcggtgccgaactgctctactccgggctgcacggccagggttaccgcgacaacaacgacaacaccgacatcgacgatttcatgttgaaaacgcgttatgcgttcaccgatcgtgacgagctgctggccaatttccactactacgatgccaaagccggcatgccgggcgggctgagcaccgcgcaatacgcgcaaaacccgttccaatccacgcggccgtgggaccagttcgaaggccgccgcaaggatatgtcgttcaagtacaaacatcaggaagacgacaaacagttcgaagtgttgacctacttcaccgacagctaccgcggcagcaacatcgaatcggaaggcacaggcaaaaacgcgggccagcggcgcatggtctcctatccgcgccactattcaacctgggctatcgaaccaagttattcgcaggtcttccgtttctgggatatggcgcacgagatcaccctcggttaccgctatctgaatgaaaccatggatgaaaaggcgtcgcgttcggcctggtataacccggcgaatatcggctcgacgccggagaccccggattattaccagcacacctccggcggcaccgcggccaacgcgttctatatcgacgacaccattaacgtcggcaactggacggtcacgccgggcctgcgttatgaaagcatccgtacccacgtggacgattcgttcaacaacatcagccgcaagaaaagctacagcgagccgctgccgtcattgaacgtgatgtaccacctgtccgacgcctggaaactgttcgccaacgccaacacttctttcggcagcatgcagtatttccaactgaccaaaggcggcaacggcaaccagccggcgccggggctaacggcggaaaaagcgcacacctatgaattcggcacccgctacgacgacaccgtagtcaaggccgaggccacgctgttctacatcgatttcgataaccagctgcagtacatcagcaacgacgtgggctggaccaacatgggtgccaccaagcacaaaggcatcgagctggcactcagctacgatctcagcgaactgaatcgcgcgctcgacggcgccagcgtctacaccagctatacctacaccaaggccagcaccgacaagggcgacttcgccggtaaagatctgccgttctactcgcgccaggtctataccgtcggtacacgttacgccaccggcagctgggtatggaatctggacggttatgcgcagtcgaaacagcattcgccgggcaccgggccggagtacatcacgcaggaaagcgccgatggccagttcggcaatatcgccggttacatggtgtggaatatgcgcggggaatataacttcgggccgcagctgtcgaacctgacgctgggtgccggggtgaaaaacctgttcgatcagcgctacttcacccgctccaacgacaacaacttcggcaagtacgtcggcgaaccgcgcaccttcttcgtgcaggggtcaatcgccttctaatgccggggcccggcagggcctcggtatcaccgacagtaaaggcgaaacaggcgcgccaggtgcgcgcccatcggcgtcagggtggtgtccttgcgttggataagataaaacgtcgctttcggcagacgctcttccagctcgagcggcaccaaatgcttgcccaaaatcggatccgaaatcacgtccaccgacagaatgctgacaaaatcgctctgcgccaccaggctggtacaggccataaaggtctcgcacgtcacgctgatcgacggcgccatgcccaagtccccaaacagatcgtgcaatagccgatagtaactgcctttcggcgtcggcatggtccagtcgcagtgctgcagctgtttcagcgaggtcgccccctccatcggatgccctttgcgcaccaccacccgatactctttttccatcagccgttcatactgcagctcgttgtcgaggctgctgggataataggtattgacggtaaaatccagctcgccctggcgcagttctgggatcatcgacaccagttgcccctcgacgatgcgcaccttcacgttggggtactcacggtgaaactgggtgaccacctgcggcatcaccgtgcgcgcaatgctgccgccaacgccgatattcaccgtgccgcccgccaaccccagccgctgctgaatgtcttcctgcgccacccgcagctcttcgaggatcaggctggcatgctggaaaaagttatcgccgcagtcggtcaataccaccccctggctacggcgaataaacagcttggcgcccagcacctcttccagctcctgaatggccttggtcagcgcaggctgggaaaggcgagaggtgcggctggcggcgcggatgctgccctggcggctaacgtccacaaatgcacgcaattggtgcaattttatcgaggctggcataggcgaaaggcgataaccgttgtttatcaatagcaagatattggcatcttatttagccagattccattgtgtacattcggaaaaaacataataaataaccaaattcttatttcgcttaattaagcgcattttctgcgccaataagcgccattcacggcagttagtaaccaaacgcacctttttctttgcaatagcttcaccgtctgatttcagttcagagcataactgctgcctggagcgatccagcgcgcgataacttatgagatatcactatgactaattcgctttcgatgttggtggctgatttgtacccgcaattgcaggcctggcgccgcgacttccaccgctatgccgaatccggctggtttgagttccgcaccgccaccctggtggcggaagaactcgatcggctgggctatcgcctgcagctgggccgcgaggtcatcaaggcagaggcgcgcatggggctgccctcgcccgccgagctggaagcgcaggaacagcgcgcccgcaatcagggggcgttggagaaatggctgccgcatttttccggcggcttcgccggcatcgtcgcaacgctcgataccggccgccccggcccgactatcgcttatcgcgtggatatggacgccctcgatctcaacgaattgctggaacccgaacatctgccgttccgcgaagggttcgcctcttgcaacagcggcatgatgcatgcatgcggtcatgacggccataccaccatcggcctggggctggcgcacgtgttcaaaagcctggaatcccagcttcgcggcaccgtcaaactgatcttccagccggcggaagaaggcacacgcggcgcaaaatcgatggtggaggccggcgtggtggacgacgtcgatttcttcaccgcggtgcatatcggcaccggcgtgccggccggcgagctggtgtgcggcagcgacagctttatggccaccagcaagctggacgttactttccgcggcgtcgcctcccacgccggcgccaagccggaagacggccgcaacgcgctgctggcagcggcgcaggctgcgctggggctttacgccatcccgcgccacagcgaaggcagctcgcgcatcaatgtcggcgtgctgcaggccggcaccggccgcaacgtgatcgccgatcgggcgtttatgaaggtggagacgcgcggcgccaccaatgagatcaacgcgtttgtctatcaacaggcgctgaacgccatcgaaggcgccgccaaaatgcacggcgtcgtctgcgatatcgcgctgatgggcgcggcgcagagcagcaaaccaacccaaccgtgggtggattacatccgccgccaggcgcagcagataaccgagctggcctcggtggtcgatcgccgcgaacaggctgcgggttccgaggacgccacctacatgatggaacgggtgaaatcccgcggcggccaggcctcatacgtcattttcggcaccgagctgagcgccgggcaccataacgagaaattcgacttcaacgagcaggtgatggcggtggcggtgaaaacgctggcgtcgctggcgctgaacctgccgacattcgggagcggagcatgagcaactcagaactgcaggcctttatcgacgactacattgaccaacgccagccccgcttcagcgcgctgagcgacgcgatttgggaccacccggaaacgcgctttaacgagacctattccgccacgttgctggccgatgcgctggaacaggaaggcttctcggttgaacgcggcgtgggcgacatcgagacggcgttcatcgccagttacggcagcggccacccgattatcgcgctgctgggcgagtacgacgcgctggccgggctgagccagcaggccggttgcgccacgccgcagccgctggtggaaaacggcaacggccatggctgcggccacaacctgctgggtaccgccgcgctggcgggcgccttcgccgccaaggcgtggatgcagcagaaccggctgagcggcaccctgcgcttctacggctgcccgggcgaagaaggcggctccggcaagacctttatggtgcgcgaaggcctgttcgacgacgtcgacgccgccctcacctggcacccggaaggcttcagcggcatgttcaataccagcacgctagccaacatccaggcggcatttcacttcaagggcgtcgccgcccatgccgccaactcgccgcacctggggcgcagcgcgctggacgcggtgacgctgatgaataccggcgccaacttcctgcgcgaacatatcgtgcaggaagcgcggctgcactacgcggtcaccaacaccggcggcagctcccccaacgtggtgcaggccgacgccgaggtgttgtacctgatccgcgcgccgcagctcgctcaggcgcaggacatttaccagcgggtgatcaacatcgccaagggcgcagcgctgatgactgacacccagatggaggtgcgcttcgacaaggcctgctccaattatgtgccgaaccgcagcctggaacgcgcgatgtatcaaaacctgtgcgatttcggtctgcccgagtacagcgacgccgagcgccgcttcgccgaggaaatccgccaaaccctgagccgcgacgatctgcgcaacgccaaactcaatattgcccgcaccggcggcgcggccgggcgcgaatgggtgcagcagttgggagataaggtgctgatggacgaggtcgcgccttatgtggaatccgacgatctgctgtacggctctaccgacgttggcgacgtgagctgggtggcgccgaccgcccaatgcttcagtccctgtttcgcactcggcactccgctgcacacctggcaactggtggcgcagggccgcaccgctatcgcccataagggcatgtgcctggccggcaaggtgatggcggcgaccgccatcgatctgctgagcgacagcgccctgctggcgcgctgccgcagcgagttcgagcgccggcgcgccgaacagccgtaccgctgcccaatcccgcagggggtgcaaccatcgccattgaaatagcatgaacagacagggcccggacaaccgggccactaagtataattataaataaatcaaataataacaatcacacaacagagcaaacacagagggtaaaatcatgagtgaggccacaacgccaatcaataaaagccccggacgcgttttttactgggtggaacgcatcggcaataagatccccaatccgtttttactgttcgtctatttgatcctggtgcttatgctggccaccgcgctgttttcctggctcgatgtggcggtgaaaaatccggccaccggcgagctcatcaaggtgaataacctgatgagcgtggcgggcatgcagtggatatttcccaatatcatccataacttcagcagctttgcgccgctgggggctattttggcgctggtgataggagccggcctggcggaaaaggtcggcctgctgcaggcgttgatgtacaaaatggcctcgcgcgtcagtgcccgctacgccagctatatggtgctgtttatcgccttcttcagccatatatcgtcggacgctgcgctggtggtgatgccgccgctcggcgcgctgatgtttatcgcggtaggccgccaccctatagccgggctgctggcggcgatcgccggcgtcgcctccggctttaccgccaacctgttgatcgtcaccaccgacgtattgctttccggcatcagcaccgaagccaccaaagcggtggacggcgcggttcacgtcagcgtgatcgacaactggtactttatggccacctccgtgatcgtgctgaccatcgccggcgcgctgctcaccgacaagtttatcgagccccgtctgccgaagtggcaaggcggcgccgaagacaaaatcgcagcgctgaccccgctgcagaaccgggggctgatgatgagcggcatcgccgcgctggtgtttatcgccatcatcgccgctctggtggtgccggaggccgcgccgctgcgtgacccgaacaccggttcggtgatcccttccccgttcatcaagggtattgtgccgatcatcatcctgttcttcttcaccgtcgccattacctatggcgtggtcaccaaacagatccgacggccggacgatattccccaccacttgctcgatccgatgaaaagcatggcgggttttatcgtgatggtgtttccgctgtcgcagttcgtggcgttctttaactggagcaacatgggcaagtttatggccgtcggcctgaccgatatgctggaagccgccggcatgagcggcgcaccggcatttctcggcctgatgttcctctccgccttcctgtgcatgttcatcgccagcggctcggcgatctggtcaattttggcgccgatcttcgtgccgatgtttatgctgctcggtttccacccggcgttcgcccagatgatcttccgcatcgccgactctgcggtgctgccgctggcgccgatgtcgccgttcctgccgctgttcctcggcttcctgcagcgctaccgcaaagacgcgcagctcggcacctattacgtgctgatcctgccctatcctttggtgttcttcagcgtgtggattttgctgctgctggtctggtatgcgttaggcttgccaatcggtcccggcgtctatccgaagctgggctaaacgcaccgctatctctccccgcgccggttcgcggggcagatccccttctccccaagcccagcagaaagattgatcttcctcactgaccaagcggctctgaggattatttcattgccttgctaaaccggttcttctattttagctcaccatctgacaacgacaaaaacagggattaagcatgatgaatcgcgtatgggtactgggcgacgccgtgatcgacctggtgccggaaaatgccaacggttatctcaaatgccccggcggcgcgccggcgaacgtggcggtgggtatcgcccgcttgggcggcgacagcgcctttatcggccgggtggggcaagacagcttcggcgcctttctgcagcaggtgctgagcgatgaaggggtggatatcggccatatgcggccggatcccgaacaccacacctccacggtagtggtggatctcgatcttcagggtgagcgctcattcacgtttatggtgcagcccagcgccgatctgtttttgcagcccgacgatctgccggctttccagcggggcgagtggctgcacctctgctccatcgcgctgtcgcaggagcccagccgcagcgcggcctttacggcgatggaacgcatgcgggcagtcggcggccgggtcagtttcgatcccaacatccgcgaagaggtctggcgccaaccggaagcgctgcgcccctgcctgcaaaaggcgctgctgctggcggacgtggtgaaactgtcgcgcgaagagctggctttcatcagccatcttgacgatctggagaacgccatgcgctggatgatgcaaacctatccgctgcgcctgctgctggtgacgctgggcggcgacggcgtctgcgtacacgacgggcatcgtctgcgccatttccgcgcgccgcctgtcgtgccggtcgataccaccggcgccggcgacgccttcgtcgccgggctgttagcggcgctggcgcgccttcacgcattgccgcaggaagcgcaatggccggcggttatcgctcaggctcaggcctgcggcgcgctggccaccaccgccaagggcgccatgaccgccctgccccgcgccgacgagttggctgctttcctgcgttgatcccctgcatccacggcgcccccctgagcgccgtggtcttttaacccgcgatttgcgtactcgatcacaatagctgaatcgggttagcaaacttgattgccagtccgcttctcgatcgctatctttcgccatgaaaaaccggtttagcaatttagcaaaaaataataacaacccttcccggatgatagacgatgatgaaaaaactcagctatttggcgataacaacagggcttttcctctccacgtctgccgcagcgacctcgggcggcgacagtatcgaggcgcgtctcaacgcgctggaacaacgcctggcgcaggcggaacggcgcgccgctcaggctgaaacccgcgccacggcggcggaacgccgggcgcaacagctggaacagcgcaccgccagcaccgaaaggcaaaccgcgcaggtcgcgcagcgcgccgccacgctggaaacgcaatcctctccgaccagcgcgctgaaactgaacggtttcaacgatctgaaactgtatggcgacgtggagttcaacctggacggcgccagccgcagcggccagctgacgtcgttgaaaggcagcgaccacaaggactggaaacccggcaacaaagagcgctgggacatcaacggccgcattctggtcgggctggacggctaccgccgcaatccggacggtaacttctccggcttcagcgtccagccgctggcggacatgagcggcaaaatgaacctggacgacgccgctttcttcttcggcaatgaaaagaactggcaaaccaaaatcggccgcttcgaagcctacgacatgttcccgctgaatcaggacaccttcattcaatactccggcaataccgccaacgacctgtacgccgacggcttcggctatatctacatgatgaaagaaggccgcggccgtagcagcagcggcggcaacctgatgctgagcaaatacgccggggatgtctatttcgaactgaacacgctggtggaagacggcacctcgctgttccaggacaacagctaccacggcaatgcgctggaaaataagaaaaacgtcgcctatttgcgcccggtgatcgcctggaagaaagacgccttcagcatcgcggcggcgatggaaagcaacgtggtgaataacgcctacggctatcaggacagccagggccgcttcgtcgatcaatccaagcgcaacggctacggcatgaccatgagctggaacaccaacgcggccgatccggataacggcgtggtggccaacctgagcgccgcctacctggatgccaccggcgagcaagacttgaccgccggcgtcaacgtgctgtggcgacgcttcgaactgggttatatctatgcgcacaacaatatcaaagagttcaataccgccgggatcgccgccgatatccacaacccgctcagcgaaccgggcaactacgacatccacaccgttcatgcgtcgtatcagatacctaacattatgaatatgaagaatttcaacctgtatttaggcgcctatgtctcgctgctggaagccaacgccgacagcaagatagccaacggcgacaacgaccagcgttacggcatgcgcgccagattcaagtatttcttctgacatcgattcacgtcgctgcgccgcaaactgcgcagcggcatttttatttagcaaggggacaacatggacattaccgcaaccgccaacgcgctgttgccgctgctcggcggtaaagagaacatcgccagcgccgcccactgcgccacgcgcctgcgcctggtgctggtggacgacagcaaggtggacaaagaggccatcggcaaactggacggcgtcaaaggctgcttcagcaacgccggccagatccaggtgatcttcggcaccgggctggtcaataaggtgcatgcggaattcatcaaggcggcgggcgtcagcgaatccagcaaggccgaagccgccgatatcgcggcgaaaaagctcaacccgctgcagcgcatcgcccgcctgctgtcgaacatcttcgtgcctatcattccggcgatcgtcgcttccggcctgttgatggggctgctcggcatggtgaaaacctatggctgggccgatgccaacagcgcgctgttcatcatgctggatatgttcagctcggcggcgttcattatcctgccgattctgatcggcttcaccgccgcacgcgaattcggcggcaatccctatctgggcgccacgctcggcggcattttgacgcatccggcgctgaccaatgcctggggcgtcgccggagggttccacaccatgaacttcttcggtctggacatcgccatgatcggctaccagggcacggtattcccggtgctgctgacggtgtggttcatgagcctgttggaaaaacggctgcgcaaggtgatccccaacgcgctggatttgatcctgacgccgttcctgacggtggtgatctcaggctttgtcgccctgctgtttatcggccccgccggccgcgcgctgggcgatggcatctccttcgtgctcagcacgctgattgctcatgcggggtggttagccgggctgctgttcggcggcctctattccgctatcgtcatcactggcatccaccacagtttccacgcggtagaagccgggctgctcggcaaccccaatatcggcgtcaacttcctgctgccgatctggtcgatggccaacatcgctcaaggcggcgcctgcctggcggtctatttcaaaacccgcgacgccaaaatcaaagccattgcggtgccttcggccttttccgccatgctcggcatcaccgaggcggcgctgtttggcatcaacctgcgcttcgtgaaaccgtttctggcggcgctggcgggcggcgcgctcggcggcgcctgggtggtggccaaccatgtcggcatgaacgcggtcgggctgacggcgatccccggcatggcgatcgtgcaggccagttctctggtcagctatatcatcggtctggcgatcgcgtttggcagcgcctttgtcctctccctactgctgaaatacaacacggacgcgcaatgatggaagaactcagcttaatcaaacaggcactgcgggcggtaatgaacggccagccgctcgcgctgcgcgatccgcaccgaccggactggcatctggcacccagcgttggcctgctgaacgatcccaacggctttatccagcataacggcgtttatcatctgttttatcagtggaatccgctgggttgcgatcatcgcaacaaatgctggggacactggcagtcggctgatttgctgcgttgggagcaccagccaatcgccctggcgcccggcgcctgttacgacagccacggctgttactccggctcggcggtggtggcggaaggcaaaatcacgctgatctacaccggcaacgtgaaattcccagacggctcacgcaccgcttaccaatgcctggctcaggaaagcgaacggggcgaatatcgcaaactcgggccggtgctgccgctgccggagggctacagcggtcacgtacgcgatccgaaagtgtggcgtcatcaaaatgactggtacatggtgctcggcgcgcgtgacctgcaggatcgcggcaaggtgctgctgtttcgttccagcgatctgcgcgactggcaagcgctgggagagatcgccggttccggactgaacggcttagaggaattcggctacatgtgggagtgcccggacctgttctcgttggacggcgacgaggtgttgatctgctgtccgcaggggctgacgccgcagccggaacgctatctcaaccgttatcaggccggttatctgctcggcaagctggattaccggcaggcggccttcagccacggcgaattccgcgagctggacgccggcttcgagttctacgcgccgcagacgacgttggcggaagatggccgccgcctgctgttcggctggatgggcgtgcccgagcaagatgaagaagcccatccgacgcgccgttacggctggatccacaccatgacctgcccgcgcgaactgtcgctgcggcatggccgcctccaccagcgcccggcgcgcgagctgcaacagctgcgcggtgagcgagcaggctggcaaggccgcgccgataacgcccccgcctatgcgctgggggccgcggagctgcaattgacgccgcagggcccgttcaacgcaacctttggcgacgcgatgacgctgaactgggacggcgaaaggctgcggctgacacgtgcttccctgaccgacggccggccggagcaccgttactggcgcggcccggtcacgcatctgcaactgctgttcgatcgttccagcgtggagattttcatcaaccacggcgaggcggtgatgagcgcacgctacttcccggcgggtgagccgcaactgcggctgtgcgggagcgcgccgctggcgttggaatactggccgctgacgccatgcatgctagaatgacgcatcctccgatgacttcagatggcgtcagtgaaaaaaaataaacgcattaccatcagtgacatcgccacgctggccggggtgtcgaaatcgaccgccagcctggtgctgaacggccgcagcaaggaataccgggtgtccgacgacacccgcgatcgcattctggcgctggcgcacgaacaccattatcagcccagcatccacgcccgctctttgcgctccaaccgcagccacacgctggggttggtggtaccggagatgaccaactacggctttgcggtgatttcgcgcgagctggaaacgctgtgccgcgaagccgggctgcagctgttgatcgcctgtaccgatgaaaacccggcgcaggaaatgatggcggtgaacagtctggtgcagcggcaggtggacggcttgattgtcgcctccagccagctaaacgacgcggaataccagaagatcaatgtcggactgccggtggtgcagatggaccgtctgatcgccggttccgaactgccgctggtgatcaccgattcggtcaactcgaccgccgacctggtggaaaaggtcgcgcgccaacatccggacgagatctattttctcggcgggcagccgcgcatttcgccgacccgcgatcggctggccggtttccagcttggcctgcagcgcgccggcatcgagtgcaaaccggaatggatcatcaacggcaactatcaccccagctcagggtacgagatgttcgctcagctgtgcgcacagctggggcggccgcccaaagcgctgtttaccgccgcctgcggcctgttggaaggggtattgcgttatctgactcaacatcagctgatggagagcgacatccacctgtgcagcttcgacgatcactacctgttcgactgcatgacgctgaagatcgatacggtcgcacaggactgccgggcgctggcgcaacatagcttcgaccaagtcaccgcactgatcgacgagcggccgctggaacagaacgcgctttatctgccgggccgtatccgctggcgccatgccggttcccgggctttgttggccgaagagtgatatctctgaaccagtaaaaagggcgccgaagcgcccttttttgtttcatcagcccgctacttggcggcgccttccatgcccaccagccccactttcaggtagccggctttacgcagggtgtccatcacgctcatcagcgtttcatagtccacgctcttgtccgcctggaagaagatggtggtttctttgttcgcctgggtgcgttgatccagcaccgaagtcaactgatcggcattcaccggctgatcgccgacgtagagctgcttgtcggccttcaccgacaggaacaccggtttttccggccgcggctgcggcttggcggaggaggccggcagatcgacgcggatatctaccgttgccagcggcgcggccaccataaagatgatcaacagcaccaacatgacgtcgataaacggcgttacgttgatttcatgcagttcgccgctgtcgtccagatcttcatttaagcgcatcgccatgtctcaccccgcccgcagttgatgtgcgtgctgagagcgcttggcttccgccgtcgcggccagatccaaatcacggccctgcagcagcaagacctgcgccgccacgtcgcccacctgcgcgcggtggccgctgatgacgcgagcgaagatgttgtagataacgacggcagggatcgccgcgaccagacccagtgcggtcgccaacagcgcttccgcgatgcccggcgccacgaccgccaggttggtggtctgcgaatgggcgatgccgatgaagctgttcatgatgccccacacggtgccgaacaggccgacgaacggcgagatggcgccgatggtggccaggaagccgttgccgcggcccatgttgcggctgtaggccgccacgcggcgctcgaggcggaagccggtgcgctctttgatgccgttgttgtcgttggattccgcagacaactccagctcattttgcgcgtcgttcagcaataccgcgctgacgctctccggaccgaagttttgcgccagttcggaggcttcatccagcgagcgcgcttcggccagcgccagctgttcgcggcgcagacggcgcttggcgcgcagcagttcgctgcctttggagaacagaatggtccaggtcacgatcgaggccagcaccaggccgatcattaccgctttcaccaccgcgtcggcgtgctggtacatgccccaaacggacaggtccatgccgcgggtttccggtggctggatcgttggcgccgggttcaccggcgtgatgctctccggcgcggcggctgcagcaggtgcaggcgcggtggtcggcgcaacgctttcggcaacggccggattgctcgccggcgcggcctgcgcgctgccggccagccctacgaccagcaccatagatgccatcaggctgcggccgaaggccttgccccactgcgcccggccctggccgaacgatccttgatttaaattcttgccagccgttttcacgctgtgcctccacccattaccgatcaaaattaaggaataattcagcgtgcgatcatatcaaaccaaccggggattgatagtggttctcattattatttaccaaataaacgagaaaattttagccagcatcgccacaaagcgccaatctgtgtccgttcaccgccaaatgccccttttatagggtgatttcgttacttttcttccacaacgacgcaacaacgccacgctgccgaacggcgcctcagccgaggaatggacttctctgttcccactcggcagaaggattacgcgagaaatgcgtgaccggcagccaattatagccgtttctatatctggaagttaaaacgtctggatggctatattaactcatgttaacgtaagggctatcgtaaacgggcacgtgcagagcaaccagaggtgagccaggtaccatgacgtcaaaacatatcgaaaccgcgctgatcggcgccggccgcggcaaacgctacacccagggctccgtcaatcccgtcacgcaacgcgcctcttctttggtcttcgactccgtcgctgccaaaaaacacgccaccgcgcaacgcgctcacggcgagctgttttacggccgacgcggcaccctgacccacttcgccctgcaggatgcgatggtggagctggagggcggcgccggctgcgtgctgtacccctgcggcgcggcggcggtggccaatgcgatcctgtcgttcgtcggcgccggcgatcacctgctggtcaccggctctgcgtacgagccgacccaggatttctgcacccatatcctcggccgcatgaacgtcagcaccacctatttcgatccgctgatcggcgccgacatcgccaaactgatccagcccaatacccgcgtggtgttcctggaatcccccggctccatcaccctggaagtgcaggatatcccggcgatggtgcaggccattcgcgccgtggcgccggaggtggtgatcatgatagacaacacctgggcggcgggggtgctgttcaaggcgctggatttcgacatcgacatttctattcaggccggcaccaaatacctgatcggccattccgattacatgcttggcaccgccgtcgccaacgcgcgctgttgggatcaactgcgcgagtactcctatctgatggggcagatggtggatgccgacaccgcctacatggcgagccgcggcctgcgtaccctgagcgtgcgcctgaagcagcacgaacgcagcagcatcgaggtcgccaactggctggcggcgcggccggaggtggcgacggtcaatcatccggccctgccgagctgcaagggccacgagttctaccgccgcgacttcagcggctgcaacgggctgttctctttcgtgctgaaggaacggctggacgatacgcagttggccgcttacctggataacttcagccacttcagcatggcctactcctggggcggcttcgagtcgctgatcctggccaaccagccggaagaactggaagcgatccgcccggcgggcggcgtcgatttttccggcacgctggtgcggttgcatatcggcctggagaacgtcgaagacctgatcgccgatctggcggccggcttcgatcgcctcaatggcgtgcgctaaggcggattccgataattttcttcgtctcgtttaatgtcggcttaagctattagcggtacactaaccgggtaactgtcagatacggtaaccgccgcatcctggagaatgtgaccccgggcgcaaccggcatgcaacaggacataaaatggatgtattacgagagattattcatgcgctttggcagcaggactttatcgccctcgccgatccaagcgtaatttgggtggtttacgccgtacttttcaccactctgtttttggaaaacggactgctgcccgcctccttccttcccggtgacagcctgctgctgctgtcgggcgcgctgatcgccaaaggcgtgatgggctttgcccccaccctgctgattctgaccgccgccgccggtctcggctgctggctgagctatatccagggccgctggctgggccacaccggcctggtgaagagctggctgctgcaactgccggcacagtaccaccagcgcgcgcacaacctgttcaaccgccacgggctgacggcgctgctgatcggccgcttcctcggtttcgtgcgcaccctgctgccgaccatggccggcatttccgggctcaacagctctcgtttccaggtgttcaactggctgagcgcggcgatctgggtctgcgcgctggtcggcctcggctacgcgttcagccaaatccctctggtgaaacgctacgaaagccaggtgatgaccggcctgatgctgctgccgctgctgctgctgtttgtcggcctgctgggtgccatgctggtgatctggcgtaaaaaacgcgccgcctcttcctgaatcgggcgcgctacagcgccttctcgaccaacgccagactggcaggcagtttgctcaccagcgtatccaccgccagccgcaccttcagcggcaggtgaggcgtgtgcggccacaccgcatgcgcttcaaaggcggcgcccggccgatcgcgcagcaagcgcaccagtgccccgctcaacaactgctcacgcaccagccagcacggcagccaggcgatgccgaaacccgccgtcgccgcatccgcaatcgcctgcaggtcgtccatttgcagccggttgttcggcatcacgtcctgcggcttgccgtcgctatccaataccagccagctgcgccgtgcgccggcgcgcatataggtcaccgcctcatgctgcgccagttgctcgatgctgtgcggttcgccgcaccgctgcagataggccggcgaggcgcacagcgtcatacggtgatcgccgatgcggcgcgccaccaagccgctgctgttggccagcgtaccgttgcggatcgccatatcgaagccgtcctcaatcagatccaccacccgatcgctgaacgacagctccaactccaacccaggatgctcgcgcgtcagttcggtcagcagcggcgcaatgcacatgcggccaaacagcaccggcatcgacacccgcagccgaccgctgacctgccgcttgcccgactccagcagcgtttccgcgccacggatctcctccagcgcccgcaggcagcgctcgtagaacagcgcaccgtcgtcggtcaggctctggctgcgcgtggtgcgatgaaacagccgcacccccagccgctgctccaaccgggcgatagttttgccgaccgccgaacgcgaaagatgcagccgactggccgccactgcaaaactgcccgcctccacggcggtaacgaataccgaaatgccgctcaaccgatcgctcatgatttgtcgctctgaaagaaacaatctgcggaaatcttatcgccactggcgaaccttcatcaacgatattatcggcaggtctgttaatcgctgactttggagaacatcatgaccaatacaatgcaacgctggacgatgagcgccctggggcgtgagcacctgcagctgagcgcaagcgccatcccacagccggggccgcacgaaatcagagtgaaagtgaaggctatctcactcaattaccgtgacaaactgatgatagaaagcggcatggggctcacgctgccgcagccgttcacgcccgcctcggacatggccggcgaggtcgatgccatcggccccggcgtcagccgctttcagcccggcgcgcgcgtcatttccaccttcagccccggttggctcgacggcgagcaaaaaccctacggcgatgcgcgccgggtgccttaccacaccctcggcggtttttatcagggcgtgctggcggaatacgtgattttgcatgaagactggctggtagcggcgccggcgtcgctggacgacgtccaggccagcaccctgccgtgcgccgggctgaccgcctggttcgcgctggtggaacaaggcaaactgcatgccggcgatacggtgctggtgcaaggcaccggcggcgtggcgctgttcgcgctgcagatcgccaaagcccacggcgcggaggtctatgtcacctccggcagcgatgaaaagctggcgcgagccctggcattgggcgccaatcatggaatcaaccggctggacggcgattgggtggaggcgatttatgcgctgacgcaggatcgcggcatcgaccatgtgatcgacaccgtcggcggcaccaacctcggcaactcggtgcgcgccgtggcggtgggaggacgcatctcggtaatcggcatcctggaaggcaacgagatttccgctcccgccggcccactgctattaaaatccgcagtaattcagggcatcggcgtcggccaccgccgcgcgctggaagacctggtgcgcgccgtggacgccgtcaacctgcagccggtgatcgaccaggtataccgcttcgatcagctgtctcaggcgttggatcacctcgatcgcgggccattcggcaagatcgtcttaaccccataaacgcggctcagccctccagcagcagcgggttggcctcgcgcagccgggcgacttcatcgctcggcgtcatgccgaacagccgtttgaactcgcggctgaactgcgacgcgctttcgtagccgacgcggatcgccgccgtgctggccttcagaccgtcatgcaccatcaacaggcgcgccttatgcagccggtacgacttcacgtactgcagcggcgaagtgttggtcaccgccttgaagttgtgatggaacgccgagacgctcatgttgacctcgctggccaactgctcgacgttgatgctgtcggcatactgatgttcgatacgccgcagtgccttggcgatctggctgaagtgggtatgccgattgaccaactcctgcagcgacgcgccgcaggcgccgcgcagcacataatagagaatctcccgtacgatctgcggcccaagcacccgggcgtcgagcggattggccatcacgtccagcagacgctcggtggcgcacagcaactcttccgtcatttccgccaggttcaccccgttgctctccgcccgcggttgcatcaggtagtcgtcatcgccgatgtcgatcagcaagtcctgcagcatttgggtatcgatattgaccgccaacccaaccagcggcagttccgggctggcgaaggtttcgcattcaaacggcagcggcaccgtcatcagcaggtagttgcgcggatcgtattggaacttcttattgccgcaataaccgaccttgtgcccctgaaaaacgatgacgatccccggttcatacatcaccggctgacgcgggctgtggcgatcgacatacaaaatcttcacccgcggcaccggcgacggcgtgtagccgttgccgctggcgatagccatcgcctggcgcgccatgcggctgcgcagcgcatcgatttcaatcacggaaacaccctcttacagtcagaacgattcggcataaatcataatttaaaactcgccatttctacagtgacttgtaggaataggcaagaaccaaacaggaatgtgcattgtgcgttgccgcccggttcctgacaatacgggccagacacctttgcgccgctttggcgcccgcctgacagaaagagagaaatcaaccatgcacaacttcattttgcataccccaaccaaaatcctgttcggcaaggagcaaattgccgaagtggccagccaaatcccggcggacgcgcgcatcctgatcacctacggtggcggcagcgtgaagaaaaacggcgtgctggatcaggtgcatagcgcgctggccggccgcgacgtgcgggagttctccggcatcgagccgaacccgacctacgaaacgctgatgaaagcggtcgaggtggtgaaagcggaaaacatcgatttcctgctggcggtcggcggcggttcggtggttgacggcaccaagttcatcgccgccgccgcccgttataccgccagcagcgacgcctggcacattctgcagaccgtcggcagccacatcgccgacgcggtgccgatgggctgcgtgctgacgctgccggccaccggctccgagtccaacagcggcgcggtgatcacccgcaaaagcagcggcgacaagcagcacttcttctcaccgctggtgcagccgcgcttcgccgtgctggatccggtggtaacctactcgctgccgccgcgccagatcgccaacggcgtggtcgacgccttcgtgcacaccctggagcagtatctgacctatccggtcgacgccaaggtgcaggatcgcttcgccgaaggcctgctgttgaccctgctggaagacggcccgcgcgcgctggccgagccggagaactatgcggtgcgcgccaacgtgatgtggagcgccaccatggcgctgaacggcctgatcggcgccggcgtgccgcaggactgggcgacccacatgctgggccatgagctgaccgccatgcacgatctcgaccacgcgcaaacgctggccatcgtgctgccggcgctgctgcacgagaagaaagcgcagaagcgcgaaaaactgctgcagtacgctgaccgcgtctggggcctgcgcgaaggcagcgaagacagccgcatcgacggcgccatcgccgccacccgcgccttcttcgagcagatgggcgtgccgacccgcatggcggattatcagctcgacggcagcagcattccggcgctgctcgacaagctgcatcagcacggcatgaccgccctgggggagcatcaggacatcaccctggacgtcagccgccgcatttatgaagcggcgcgttaatcgcaaaacggcgattttttgctaggctttagtctccgccagccattttcgccgcatcctgcgcccggccgatcaccgggcgcagtcgggcgcttcagcgccgccgatcgtttcgcaccactcgtcttaccgctcattcgcagggagagcggggagaaaatcgccctcccgccaccgctgaaattaggctggcaaacccggcaaccgcccattttgccaactagaatttatctatagccgtttcggcgccgcaggcgccgcaatccgtacacaaggagatgcgcatgacaacgcaacaacccatcatcaaactccacgatggtaatctgatgccgcagttgggtctcggcgtttggcaggcgagtattgaagagaccacccgcgcggtgagcaaagcgctggagatcggttaccgctccatcgacaccgccgcgatctacaagaacgaggaaggcgtcggcgccgcgctgcagtccagctcgctgccgcgcagcgacctgttcatcaccaccaagctgtggaacgacgatcagggcgatccgctggcggcgctggaaaccagcctggaaaaactcaagctggactatgtggatctgtatctgatccactggccgcgcccgcagcaggatcaatacgtctccgcctggcgcgaactgatcaagctgcgcgagcaaggcctggtgaaaagcatcggcgtgtgcaacttccatacgccgcacctgcagcgcctgctggatgaaaccaacgtggcgccggtggtcaatcagatcgaactgcacccgctgctgcaacagcgccagctgcgcgcctggaacgctacccatcacatcgccaccgaatcctggagcccgctggcgcaaggcggtgaaggggtgttcgaccagccgctgatcaaggcgctggccgagaaatacgagaaaaccccggcgcagattgtggtgcgctggcacctggacagcggtcttatcgtcatcccgaaatcggtcacgccgtcgcgtatccgcgaaaacttcgaggtatttgatttcaaactcgataaggacgagctgggcgagatcgccaagctggacgtcggcaaccgcctggggccggatccggataccctgtaaccccctcaagccctctccggccggagggggcttttccttcccgcacattgctcccttgcgccgcctgacgttatgatgacgacgccggaggctccagccgccggttcacgccgttaaaaaaacagacaagcacggagcaccatgaaattttctttctcacacgggtcacggctgggcatgctttgcatcatgctggtgctggcgggttgcgccggcaagaaacagcgcgtcagctacgatcgccacgccttcgacagcgccattaaagacgccgccagcgaatacggcgtggacgccaagctgatcaccgccatgatccaggtggagtccggcttcaacccttccgcagtgagcagatccaatgcgatcggcctgatgcaactgaaagccgataccgccggctgcgatgcctatcgctacaaaggcaaacgcggctgcccggacgacgatgacctgcgggatcccgacaccaatatcgatcttggcgccgcctatctggccaccttgcaaaaacaacagcttaaagggatcgccaatcccgtcacgctgcgctacgccaccatcatcgcctacgtcaacggcaccggcgcgctgctgcgcaccttctccagcaaccgtcagcaggccatcgcgatgatcaacaacctgtcgccggaggcctttaactggcacgtgcgcaaataccatcccgcgccgcaggcgccgcgccatttgatgaaagtggaagccgcctacgagcagctgtgacgctcaaaagtaaaaaggagaacccgggggttctcctttttgtttacgcacgcggtgcggccgttacggcttggctttgcgaatcggtttacgcgtcggccggttggacggcgtgcgctgccgattgatatcggtatgtttggtcagcgccggccgggtatggcgctgcagccgtttcgcttcgcgctgctcgtcgatgctcggcgccggcaccagacaatcgcggcggctgccgatcaggggcttcaggcccatctcttccagcgcggcgcggatcagcgcccagttggccggatcgtggtaacgcagcagcgccttatgcaggcggcgctggcgatcgccgcgcggcaccaccacgtcttcactcttgtaccccaccttgctcagcgggtttttgccgctgtaatacatggtggtggagttggccatcggcgaaggatagaagttctgcacctgatcgaggcggaaacggttcttcttcagccacagcgccaggttcaccatgtcttcatcacgggtgcccgggtgcgacgagataaagtatgggatcagatactgctctttgcccgccagcttcgaatagtgatcaaacagctgcttgaagcgatcgtagctgcccatgcccggtttcatcatcttcgacagcgggccttcttcggtgtgctccggcgcgatcttcaggtagccgccgacgtggtgggtcgccagttccttgatatagcgcggatcttccaccgccagatcgtaacgtaccccggaggcgatcaggatcttcttgatgccctccagcgaacgcgcgcggcggtaaagcttgatggtcggctcgtggttggtatccatataagtgcagatctccggatacacgcacgaggcgcggcggcaggtctgctcagcgcgcgggttggtgcaacgcagcatatacatgttggcggtcgggccgcccagatcggagatcacaccgataaagcccggcaccttgtcacggatctcttcgatttcgcgaacgatcgaatcttccgaacggctctggatgatgcgcccttcgtgctcggtgatcgaacagaacgaacagccgccgtagcagccgcgcatgatgttcaccgagaaacggatcatgtcataggccggaatgcgatcctggccgtaggacgggtgcggtacgcgttgataaggcagggcgaagacgctgtccatctccggcgtggtcagcgggatcgccggcgggttgatccacacgtagcgatcgccgtgtttttgcatcagcgcgcgggcacagcctgggttggtttcatggtgcaaaatacgcgaggtgtgcgcatacagcaccttgtcgcccttcactttctcgaaggacggcagcagcacgtaggtcttctcccacggcttcggtttggcggcgcgcacggtgacaggtttggcttccggctctttcggcttggcgccgtcggcgcacggcagatcctcgccgtacgggttcgggataggttcgatgcggcccggcttgtcgaggcgggtggaatccacgccgctccaacccggcagcgcttctttgcgcatcaccgcagtattgcggatatcgtggatatcgccgatcttctcaccggcggccagacggtgcgccacttccaccagcggacgctcgccgttgccgtagatcagcatgtcggctttggagtccaccagcaccgagcggcgcacggtatcagaccagtaatcgtagtgggcgatgcgacgcagactggcttcaatgccgcccagcacgatcggcacgtctttataggcttctttgcagcgctggctgtagaccagggtggcgcgatccggccgcttgccgccgacgttgccggcggtataggcatcgtcgtggcgcagtttgcgatcggcggtgtagcggttgatcatcgagtccatgttaccggcggtgatgccgaagaacaggttcggtttccccaaccgcatgaagtcttctttattgctccagtccggctgcgcgatgatgccgacgcgaaagccttgcgcttccagcatgcggccgatgatcgccatgccgaagcttgggtgatcgacgtaggcgtcgccgctgatgatgatcacgtcgcagctgtcccagcccagttgatccatctctgcccgcgacatcggtaaaaacggcgcggtgccaaaacattcggcccaataaggcttataggaaaacagttcacgatcgggttggatcaggctggtggtgctcattctgctgctctttttacaggttaattaatcgccgggcggcgattatacgcactagcagcaaaaagagcatggttatttcgctaaccgttcacttcgaattcataaacgtcgctgcggcacaagatatcgctgaactccagcgcctcaccctgagcgttgcggctggtttggatgatgtgcaacaacggcgcgccgcacggcacgttgagcagttcggcgacctcgtcgctgcaggacaccgccttcaacagaaagtgtttatcctccggcacgatgccgcgcgattgccataacgcatacagcgagtgttccagctccgccggttcgggcaagaagcgcggtggtatataggtggtttccagcgagaccgggctgccgttcagcaagcgtaaccgccgcagtttgatcacttcatccccctccgccagtcccaacgccgccgcggccttggccggcgcgccgactcgggtgcgcagcagccatcgattgctgacgcggctgccatgacgcagcgcctgagcggtaaacccgctgtccttatcgagggaatagccgatgcgcatcgccacgcgggtgccaacgccctgctgccgcgaaatcagccccttctcctccagcagcttcatcgccttgctgacggtgacacgcgacagcgccaaaccttccgccatctgccgttccggcggcagaaatgcctccgccgccaacacctgctgcctgatcgcggtttctatcgccgtcgccagctgaatataacgcggcgctaccgccccctgggccagatggccacgcagccaggccataaaatccgtcattcgcccgccctcttacctatgccatttgtctggatttcgttttttatcctatcgccgatccagcgataagcccctcaccttaactaaaatatcgctaatgttttcagagtggcatcacaatttttgcctaatggactttcattggatctagatcgcgcgtaatctgtgcttattgatgttgatacatcaatcgcaccaacaccagggacccactttaaaaacaataaaaaacccgctgccagccctaaaggatacccttgatggccggtagcgggtctatactgtcagcacaaacggccgagaataagcaacgtagctaatggatagcctgctcactgctcatcgccgcatcacaggatcccctcgcggtgggcgaaccggatcgatgtcggcaaatagaaaggttcccgcttcgccaaaccccgctgcagacccactctttgactacactcattggcgccgtgcggccgacgtgcctcacccgataaggcggataccgccctcattttgacagacccggcggcatcagccgctacacactgcgcggaatcggcgtcttcaccgataacgggatagccggcctcaaccgcgccaacggaatcgattttcagtcaactgcggcggccctcgcggccctgcgcaacagggatcatttgctatgaccgatatcaatcgcaatgaagcatggaaggtagaaagcaccggtatcgaccgggtgccggacgcggaacagaccggtaagcccatcgagctgttttggatctggtcggcagccaatatcggtattctcggcgtggtgtacggcgccatcatcgtcggcttcggcttatcctttctgcaatcggtactcgccgcgctggtcggcgtcgccagcttcgtgctggtcggcctcaccagcttcgccggcaagcgtgggcgtacctctacgctgacgctctcgcgagtgattttcgggctgaagggcaacgtggcgcccaccctgttcagttggatcaacctgatgggctgggaagcggtcaacgtgatcaccggcaccctgacgctggcggcgctgttcgaggccttcggactgggaaccagccacctgctgaccgcgctcagcctgctgctgttcggcgggctcactgtcgtcgtcagcctgctggggcaaaataccgtggtctggatgcaaagctggttcagccgcatcttcggcaccatgacgctgatcgtggtgctctatatcctgttcaataccgagtggagccaggtgctggcgctgccatccggcagctggctgaccggtttcctgccggcggtatcggtgatcgccgccggcaccggcatcagctgggcaatcgccggcgccgattacagccgctatcaaagcccgagctcgtcgagcaaaggcattttcgccgcggtgatgggcggtgcctgtttgccgctaatgctgctgatgctggccggtattctgctttccgtacagctccccgatctggccagcgccgccaaccccatcgcgctgataggctcggtgctgcccgcctggatggccatcccttatctgctggccgccaccgccggcatcgtcaccatcgcggtgctcagcctgtattccgccagccttaacctgctgaccatcggcgtgcaggtcaaacagtggctggcggtatcgatcgacgccgtggtggtgctgggcatcgccctgtatgtgctgttcatctccggcgactttatggggccgttcatctccttcctggtgttctgcggggtgttcctggcggcctgggaggcgattttcctgctcgattacctgtgcctgcgccgccgccacgggtatgatggcaacgctttgtacggcctgcatggccagaaccgcggcgtgcgcaaagccccgctgttctgctggttcctcggcgccctgtgcggcctgctggtcaccaaaaccggttttatcgacggcccgctggccaaaggcttgttcgccgactccagcctggggctgtttgtgtcgtttgcggttagtctgatcgcttacggtctgtacctgacccaacgcagagaacatcaatgaatgagagggaagctgtaacacctgtcctggtgatggggggcgcggtcggcgatctggtgatgacgctgccccgcctgccgacccgaggtgaagatatcgaagcccagccgcaggcgcggcaaatcggcggctgcgcgttcaacgtagcgcgcgcgttgacgcgccttgaagtgccggtgatcaacggtatgccggtcggcaacggcgaatggggcgcggcgatcgaagccgccatgggcgaactggggctggaggtgctgttgcgccacggccagatggacaacggctggtgcctggcgctggtggaaccggacggtgaacgcacctttatcacggtttccggttgcgaaagccaatggaataaagcgcagctggcgaccctgccgctgacggaacacacgctgatctacgccagcggctacgagctggccggtgaaaacggcgaagcgctgcgcgagtggctgacgcgcatgccgttcgaccaaccgcgcctgatcgatcccggcccgcgcgtcgcccagctcagcgaagatttcttcgccatgctcagcgacagccacaccctgctgacgcttaaccgcgacgaagtggccacgctgtgcggcgccggcgacgccgtggaggccgcacagcgctatgccgccgcgcgtaatctgacgctgatttgccgcctggatcgcgacggcgcatggatctgcgacggccgtacgccgccgctgcacgttccggcctatccggtagaggtcgttgacaccatcggcgcgggcgatgcccactgcgccggtttgctggcgggcctgtccgccggctggccgctgccgcaggcggtcgatctggccaaccgggtcgccgcttgcgtggtggccagcctcggggccgccaatccgccggaccagcagcagctgcagcagcgcttcccgcaggcctgacgtttcagggcgcagcaaagccgcgccctctgcctcactgcgccgccgccgcgttctcctgcggcaggtggcgatagttgaagctcaacgcgaacacaatccccagcaccagcgtatacagcgcaaacaccagccagatgctctgccagtctttcacgccgtcatggctgaagaagtccaccacctcaccgctggcgagcgcccccagataggcgcccaaaccgttcaccatggtcatgaacagcccctgcgcgctggcgcggatgcggtgatcggcctccttctcgacgaagatggcgccggagatattaaagaagtcgaacgcacagccgtagacaatcatcgacagcaacagcagcacgaaaccaaagccgaccggcgtgccgtacgccaggaatagaaagcgcagcgtccaggccgccatgctgatcagcatcacctgcttgatgccgtaacggcgcaggaagaagggtatggtgaggataaagaacacttcagagatctgcgacagcgacagcagcaccgccggataccggacgctgaggctgtcctgatacagcggattgagcgacagatcgtgcaggaacgggttgccgaaggtattggttatctgcagcgccgcgccaagcaacatggcgaacaggaaaaacagcgccatgcgccgctggcggaacaacaccagcgcatctagccccaacacgctcacccagctcttcgactcggccgcgcggttggtcgggcagcgcggcagcgtcagcgaataggcggacagcagcagcgacgccgcagaagccagatacagctgcaggttgctgagctcgatgcggctgaaaccgaccaaccacatcgccagaatgaaccccacggtgccgtacacccgcaccggcggaaagtccctcaccgtgtcaaagccgtgtttctccaggcaaaaataggaaatggcgttggagagcgcgatggtcggcatatagaccatggcattgaacagcatcacccagaacatcagcatcggttgctcgacctgcgctgcgcagtacagcgccagcgccccgagcaggtggcaaagcgcatacagatagttggccttcatccaacggtcggcgatgatgcccgccaggcccggcatgatcagcgccgcgatgcctttggcgctgtaaaccatccccacctgcatgccgctgaaatgcagcgtgttgatcatgtaggagcccagcgtcaccagccaggcgccccagataaagaactgcaggaaaatcatgacttttaatcgtgtttttatcgccatcgccatcaccttgttattatgctttcaacgatgattggtgcggcgggccccctgcagcccgccgccggtctgcttgcggtgttacagcgttttgaacagctcgcggatcaggcgcatgaaatcgtccgccgccagcgccgcgcagctgagcgtttgttcgtgagaaagaggcgtatccgacagcccttcggcgtagttggtcatcgcggacaccaccagcaccttgaggccacagtgccgcgccgtcaggacttccggcacgatcgacatccccaccacgtcgcagcccagggtctgcatcatgcggatctccgccggcgtttcgaagttcggcccggtgtaggcggcgaataccccttccgccagcgggatgcccgcgctttcggccaccgccgccagccgggcgcgcagatcgcgatcgtaagcgttcgccaggctgaagaagcgcggcccgaagcgatcgtcgttggcgccgaccagcggtgattccggcatgaaattgatgtgatcggtaatggccaccaggctgcccggcgccaccgaacggcgcagcgaaccggcggcattggtcgccagcaggaattcgcaacccagcagtttgaaggtgcgcactgcggtggtcatcacctgcatgccacgcccttcatagaaatgaccgcgccctttcatgcacaataccggcacgccctccagcttgccggcgaccagttgcccggcgtggccggcgacgccgctcaccgggaagcccggcagctccgcgtaatcgagggtgacggtttcggtcatcacctccgccagggcgccgagcccggagccgagaatcaaggccgctttcggctggaaacccggcaggcgtgcgcggacgacatcggcgcaggtaaaagcatcttcttgattaaacatcgtattctctctttcagcgggggataataagccccatagtagagagcgaggcgcggccgagaccaatacattcttggcggccgatttattccatttacctataagttgagctgcgtcacaaggaggagataccccggatgaacccgccccaagccctgcccgatcccggccggattaacttccgcctgctgcactatttccgcgtggtggcggaagagatgaacttcacccaggcggcgcggcggctgaatatgtcacagccgccgctcagcaaacacatcaaagagctggagagtcagcttggcgtcgtgctattcaaacgcaccacccgctccatgacgctgacgccggccgggcgcacgctgctgcgcaacgtcgagcggctgctggatcaggccgacagcgcgttgcatcaggtgcaacagatgggacgtggcgaaggcggccacatggtggtcggcatggtcggcacctcggcctggggcggcctgatcgcggcgctgcggcggttcagcgagcggagcgccggcgtcacctggtcgttgaacgagctgacgcccagccagcaaatcgccgcgctgcaaaagcggcatatcgacatcggggtctggcgagaggcgcagcagcagacgctgccggggttaacctgccaacggttggcaagcgagagcatcgccgtggtgctgccgctcgatcatccgctggcgcggcaggaaaacatcccgctggcggcgctgcagaacgacagcttcatcgtgctgccgccgcatgaggccagcctggggctgtatctgcacaatctgtgtctgctgcagggatttctgccggacgtcgcttatcaggtcaacgaaccgcagaccctgctggcgctggtggcggaaggctgcggcatcacgctgctgccggacagctacggccgcatcccgtggcccggcgtacgcttttgctcgctgcaacaggcgccgccggcggatttatacgcggtgtatcgcgccgacagcgtcacgccggtggtgcaggccttcctggaaatgctgcgggcgccgtaagcggcccacagcgcagattacatcgtcggctgcaccatcagctggccggcggtgccgcgatcggccatctccagcgtctggctgtaatacaggaacgggaagtgttcggaggtaggttggttgaaatacaccagcagctcgacgtcgccatcaacccagacggtgtccttccagccgcgatcttccgccatcggctgcgcgccgttgacgcgtttaatcaggaactgcacgccctgaatatggaacgcctgcggcgtatccgcgtgaatgttccagcgttcccaggtgccttgctgcgcctgtacgtcgatgcggttcatgtcccaaatcgcgccgttgatgccgacgccgccgtcgcccaggcggaaatcgcgggtgcggctggcgctgccgtccaacagctgatccgccagcaggcgcatcggcaggttgtcggtcaccagtggcagcaggccggtcgggcgcagcgtcagcacctgggtggacaccagaatgctcgacggctcgaacaggccgcgcaggcgatccatgatgcccgccgcttcaccggcggtgatggtcacctcctcgcccttcgacatgtcgatcagcacttcccggcgttcgccaggcgccaacgacagctgctgcaccgcgaccggcgcaggcaggaagccctgatcgctggcaatcacgttgaacggccgcccgtcgctgagctgcagggtatagcggcgcgcgttggaggcgttaagcaggcgcagacgcacccagccgcgcgacacgtcgacatacgggttttgcacgccgttgaccaacagcgtatcgccgacgaaaccgccctgcgacggtgcatcgtattgcggtgtgccgaagttatcgaagcgtttgtcctgaatgatcagcgggaaatcgtcgacgccgtagtggttgggtagcggcagcgctttgctgacggcatcttccaccagccacagcccggccagcccgttgtaaacgtgcggcgccatacggttcggcgtgttggcgtggtaccagcaggtggccgccgcctgacgaatgggcagcaccggcgaccagtcgacgttaggcgacatcatgcgcggcgcgccgcccatcagcgtgcctggcacctgcagaccgctgacggtcatcgctaccggctcctgcaggcggttgctgtagatcagtttgacgtcgtcaccgctgtaaacccgcaccgtcggccccaggtacatgccgttgatgccccacaccgccgctttacggttatccataaacgcccaatgggcgcgctgcaaggtcaggaacagcggctgaccgcggcgagactccagcagcgggggaatgggtaacggggtctgcgttccgctcgcctcagccctcagcggcacggcgcccgcgcacagcgccaggcccgatgcctgtaaaaactgacgtcgactgagtgacatattttctccatgaaaagcaataactaaaccgtgtgcaaaacccaaacgcccgccaatcaagattagcaggcgttcaggcgttaacggcgctgaacgccaattaaaaccctattctttgaagccggtagactcttattttttggcggcgttgcgctgggcgacttcggcgtccaattcggcgattttcgcctccatcagctcgcggcaatgggccgccagctcacgcacgttttctttgccgtatttgctggtatccaccggcgccaacatctcgacgatcacatgaccgttattccagcgattaagatttatattaccgctggtggtggatacgcagatcggcacaatcggcacgccggcggcaatggccgcgtggaaggcgccggttttaaacggcatcagcccacgaccgcggctgcgggtcccttccgggaacatccagatcgaaatgtctttctttttgaactgctccgccacctgggcgatggtgccgtgcgccttggcgcgattatcacgatctatcagcagattaccggtcagccaatacagcgggccgaaaaacgggatccacaccagactttttttaccgacggtcacggtgcgcggctgcacgatattggaggccgtcaccatgtcgtagttattttggtggttggcgatatagatgcagttgccattgttggccgcatcggccggcacgcgggtttcaaccttgatgccgaacagcgtcgacaggcggccgaaaagatggccgaaggtcgccacatggcgagggttgcgcgggctgaacaagcaataaacagaaccgaaaatacacaccagaatacagaaaagagtggcgagaacggcacgcaaaatcaataacataacaacctcattagcacactgccaacgcagtttacttcgctgcgcagattcctttactcattatttgccggccaggcggtaagcacgccgatgtcgcctgcatttctcgctattttcctgccaggcggcagtacgcacaataattttatgcgcagaaatgttaactatttggaaaataaacgccagcaaaaataaataaggcggccacagctcgctgcgaccgcccgttaacgccggcgccaacgcttactcttcgctgtcgccgcccgacgcccgcaccggcgcatccacttcgacgcgatcgatgcgctgcaggccgcgcggcagctgggtgcccttacggccgcgctccgcgcggaacttctgcagatcttccggacgcagcgtcagcttgcgtttgccgacgtgcagcgtgacggaggcctgcggcggcagcacgaacagccaggccagcttgtcttcaccggcggcggcctgcgccgccggaatggagacgatcttgttgcccttgcccttcgacagctgcggcagatcggcgaccgggaacatcagcatgcgcccggcggcggtgatcgacagcagcatatcgtctgcgccgtggatctccatcggcggcagcgctctggcgttgtccggcagcgtgatcatcaccttgccggcgcggttgcgcgccaccagatcgttgaaggtgcaaacgaaaccgtaaccggcgtctgaggccatcagcagtttttgatcgtcggccgccatcagcacctgctcaatggtggcgcccggcggcggcgtcagcttgccggtcaacggctcgccctgcccgcgcgccgatggcagcgtcatcggatcgagcgcatagctgcgcccggtagagtcgataaacaccaccggctggttgctcttgccgcgcgccgcgccgcggaagctgtcgccggccttgtagctcaaccctgccggatcgatgtcgtggcccttggcgctgcgcacccagcccatttccgacagcacgatggtcaccggctcggacggcacgaagtcgtgctcgctcatcgccttggcttccgcgcgctcggtcagcggcgaacggcgatcgtcgccgtaggtttgcgcgtcggcctggatctctttcttaatcagcgtattcagcttgcgctcggacgccagcagcgcctgcagttgatcgcgctctttcgccagctcgtcctgctcaccgcggatcttgacctcttccagcttggccaggtgacgcagtttcagctcgaggatcgcttccgcctgggtatcggagatgccgaaacgctgcatcagcaccggcttcggctcatcctcgctgcggatgatgtggatcacctcgtcgatattgaggaacgccaccagcaaaccttcgaggatatgcaaacgcttgagcaccttctcgaggcggtagttcaggcggcggcgcaccgtatcgcgacgataggccagccattcggtgaggatctccaccagccctttaacctgcgggcggttgtccagaccgatcatgttcatgttgatgcggtagctgcgttccagatcggtggtggcgaacaggtgattcatcacctgctccagatcgatgcggttggaacgcggcacgatcaccagacgcgtcggattttcgtggtcggattcatcgcgcagatcctcgaccatcggcagcttcttggcgcgcatctggctggcgatctgctccagcaccttggcgccggagacctgatgcggcaaggcggtgatcaccgcgctgccgtcctctttcttccacacggcgcgcatgcgcaccgagccgcggccgctctggtaaattttgcgaatttcatcgcgcggggtaatgatctcggcttcggtcgggaagtccggcccctgcacgaactcgagcaggtcatcgagcgaggcgcccggcttgtcgagcagcgccactgccgcagcggcgacctcgcgcacgttgtgcggcggaatgtcggtcgccatgccgaccgcgatgccggtggtgccgttcagcaggatgttcggcagacgcgccggcagcatcttcggctcttgcagcgtgccgtcaaagttcgggatccagtcgaccgtgccctggcccagttcggccagcaagacctcggcgtatttggacaggcgcgattcggtataacgcatcgccgcgaacgacttgggatcgtccggcgcaccccagttcccctggccgtccaccagcggatagcgatacgagaacggctgcgccatcagcaccatggcttcataacacgcgctgtcgccatgcgggtgatacttacccagcacgtcgcccacggtgcgggcggatttcttgaatttggcgctgttggtcagccccagctcagacatggcgtagatgatgcggcgttgtaccggcttcaaaccgtcgccaatgtacggcaacgcccgatccatgatgacgtacatggaatagttcagataggcgttttcagtgaatgtgtgcagcggtaaacgctctacaccgtcatgagtcagatcactcattactcaattatcctcagaccgtggcttggcaatcccttggacgacaaaaggcatcgcttgtcgattctgcccgcgatagtaacccatctgcggggtagctgtcacagttggcgcaaggatcgccggcgacggccgattgcgcgatgcggtttatgcaaaatttagctacctggcggcctctttattgactgacagtcaacactgttgtgcgctggatcgcatttttacttgcctgactcacgattacactcgtcaccagcgagatggtttccgccttttccgcgggaagcatgccatatcttaacactgacgggagccgcgaaagatgagcaatatcctgattatcaacgctaaaaaacaattcggccattccaacggcgaactcaaccaaaccctgagcgacgtggcggaaagcttcctgcgcgatctgcagcacgatgtgcaggtcaccgtggtcgacgacggctatgacatcgaagccgaagtacagaaatacctgtgggccgacgcgatcatctatcagatgccgggctggtggatgggcgaaccttggatcctgaaaaaatacatcgatgaagtgttcaccgccggtcacggcagcctgtatgccaacgacgggcgctctcgttctgacgaaagcaaaaaatatggctccggcggcctgatccagggcaaaaaatacctgctgagcctgacctggaacgccccgatggaggccttcaccgatcccgatcagttcttccacggcgtcggcgtcgacggcgtttacctgcacttccacaaggccaaccagttcctgggaatggaagcgctgccgacctttatctgcaataacgtgataaaacaaccggatatcgaagcggacatcgcacgttatcgcgagcatttggcgaaaatttttgcttaactgacgcagaacattctcatcaacgaggcagacatgatcaccgtaatcgcagaaatcaaagtgaaacccggccaccgcgccaccgtactgcaagccattgaaaaactggtgccgctggtgctggcggaagacggctgcggcgaatatacgccgatggtcgacagcaatacccaggccccctggcagaaacggtcgccggattcggtgttcatgctggagaaatgggaaagcatggcgcatctggaaaaacacctggccattgagcacatgctcaaacaccgcgagactatcaaggacagcgtgctggacaccgagatctacatcctggaaaacgccctgtaagctccgccttataacgtctgcgcgtcgatgtgcgcgctgacgtagtcaagaaaacaggtgatgcgcgccgccaattgcgtattgcggtaatacaccgcgttgatcggctggcgcacgtccagcgtctcctgctccagcaacgtcaccaacttgccggcttcccgatcgcgacgggtcataaagtctgccagctgtacgatcccctcgccctgcagcgccaattgccgcagcgtttcaccgctggacgcagagatcgtcggcgtgatggcgaaatgcggcgcctggcgatagcgcaacggccactggttcagcgactccggctgggtaaaaccgagcagacaatgccgatgcaactcctccacgctctgcggcgtgccgtgctgctgcagataagccgggctggcgaggatgcgcagccggctggcgcccagcgcgcgcgcatgaatggtcgaatcacgcaacgccccgatgcgaatggcaatatccgtgcgtttttccagcagatcgataatcaggttgtcggtgttcagctcgagcgaaatttgcggataacgttctctgaatcccgccaccagcggcacgatgacgtgctccataaaaggtgcggccgcattgatccgcagccgcccggcgggcatttgccggcgcaccgccatttgctcttcggcattttccaccgagctgatgatcgtacgcgcatggttcaggaagctcagcccctcttcggtcagctccaaacgacgcgtcgtgcggcgcatcagggtggtatcgagcttattctccaggcggctgagcgcgcggctgatgccggatgttgtctggccgagccgatcggcggcggcggtgatagaaccgctgtcgaccaccgaggtgaacgccagcaattcttcgagcgtgatcttcatgcattccggcccaggttatcgggcgccgcatgaacgccctgcgggaaagccggcccggcgtttcgccgggccagggtcaggctcagaccgccaattcggccatgtcgcccttgtcttgcagccagttgcggcgatcttccgaacgcttcttggccaacagcatgtccatcaccgccagcgtctgatcgacgtcatcttccgccaccgtcagttgcaccagacggcgggtgttcggatcgagggtggtttcgcgcagctgcagcgggttcatctcgcccagccctttaaagcgctgcacgttcggcttgcccttcttgcgcttcagctgttccagcacgccggctttctcttcttcatccagcgcgtagaacacttctttaccgagatcgatgcgatacagcggcggcatggcgacatagacgtggccgcctttcaccagcgaacggaagtggcgcacgaacagcgcgcacagcagcgtggcgatatgcaggccgtcggagtccgcatccgccaggatgcagattttgccgtagcgcaattggctgagatcttcgctgtccggatcgatgccgatcgccacggaaatgtcgtgcacttcctgcgaggccagcacttcgtccgaggacacttcccaggtattcaggatcttgcccttcagcggcatgatcgcctgatattcacgatcgcgcgcctgcttggccgatccgcccgccgaatccccttccaccaggaacagttcggtcatagccagatcctgcgaggtgcagtccgccagcttgcccggcagcgccggcccgctggtcagcttcttgcgcaccactttcttggcggcgcgcagacggcgctgggcgctggagatcgccagctcggccagctgttccgccgcctgaacgttctggttcagccacaggctgaaggcatctttcaccacgccggaaacgaaggccgcgcactgacgcgaggaaagacgctctttggtctgcccggcaaactgcggatcctgcatcttcaccgacagcacgtaggcgcagcgatcccagatatcttccgccgacagcttcacgccgcgcggcagaatattgcggaattcgcagaactcgcgcatcgcgtccagcagcccctgacgcaggccgttgacgtgggtgccgccctgcatggtcgggatcaggttgacgtagctttcggtcagcagctcgccgccttccggcagccacagcagcgcccagtccaccgcttcggtgtcaccggcgaagttgccgacgaacggcgcttccggcagggtgatcaggccgttaaccgcttccatcaggtagtcggtcaggccgtcctggtaacaccagcgctgctcggtgttgttcaccttatcgatgaaatagatctcgacgccggggcacagcactgctttggctttcagcaggtgagtcaggcgcgataccgagaaacgcgggctgtcgaagaactgttcgtcgggccagaagtgcacgctggtgccggtgttgcgtttgccgcaggtgccggtcaccgtcagatcttgcactttgtcgccgttttcgaaggcgatgctgtaaacgttgccgtcgcggcgcacgttgacttccacccgcttcgacagggcgttgaccaccgagatgcccacgccgtgcaggccgccggagaactggtagtttttattcgagaatttaccgccggcgtgcagccgacacaggatcaactcaaccgccggcacgccctcttccgggtggatgtccaccggcatgccgcggccgtcgtcgatcacttccagcgactgatcggcgtgcaggatcacgtcgatgcgcttggcgtggccggccaacgcttcgtcgacgctgttatcgatcacctcttggccgaggtggtttgggcgcgtcgtgtcggtatacatgccgggacgacggcgcactggttctagaccgctgagtacttcaatggcatcagcgttatagctggattgagtcatcgttgattattttttcgtggttaaagggaggtgccggaacggcccgtcagaccgcgtttagccctaaaaaatccacaatctgggggaagtagtgctcgaaaccgacgaaggcgtggtttccacccgactccaccgtttgccgacacgcggtgtaatacgccactgcctggccgtaatcgagaatttcatcgcccgtttgctgcagcagccagattaaatccggcgactccaaaggatcgatctgcatcactttcagatcgtaaacgtgccgagactctaacacatattgctggccggtgtaggggttctcgttggcgccgaggtagtcgaccagcagctcaaacggcttgaccgccgggttgaccaccaccgccggcagggaaaaacactgcgacagccaggtggcgtaatagccgcccagcgatgagccgaccagcccgagcgtttgcccggcgcgttccagcaccagattttccagcatctcggcggcctccgccggaaaggccggcagctgcggcaccaacatctcgatatcgggatggtgttcggccagccaggccttgaaggccaccgccttggccgactgcggcgagctgttgaaaccgtgcaggtagagcagtgtcgaaggcatcagtatccatccgagtccatatcggggcggaagtcgtcgttttccaggcggaacacctgcgtctcgacgcgaccgtccggcagcagatcgaggtagcgccagccgggggaaacgtcgtcaatggtgaagttcgtgcagtgcggcttgaattgcacgcaggtagacggcgtcgccaacaggcgccgcccctgccattccagatccagatcctggtgaatgtgcccgcacaccacggtattcactttcggataacgcagcaggatcgcgcccagcatatgcgggttgcgcaggctgtgctgatcgagccaggtgcaaccggacggcagcggatgatggtgcagcagcaacagcgtatagcgctcggggtgagcctgcaggcagcgctccatccactccagctggtattcgctcaactcgccgtgcggcacgccgaacacctggctgtccagcatcagcacctgccagttatcgcccagcagcacctgtttggaaggcgcgatgcccgcggcggccaatgcgtcgaccatcgccggttgaaaatcgtggttgcccggcagccacacgcagggagcaggcagttgcgcgatgccggcggcgaagtggcggtacgcctcttgcgaatgatcctgcgccaaatctcccgtggcgacgatcaaatcgacgtcgcggcgctgcgcctggatggcgtccagcaccgcgtgatagctgcgataggtattgatgccgagcaacgtctcgtgttcgccggcaaaaaggtgggtatctgttatttgtagaatcctgaccgcggccccactcgccacgggcagtttaaacaggctttccaaatggtgtcctttgttatttcagtctgtctaacaaaccggaaccgccatcgctccatgcgccaaacagtagcgcagccaatcagcaagaaactggttaatttgatgcttttcgtcgcgttgatgcaactttttattaggataatcataacgcgctttaaagcggtagatctgctgactggaacacacttccgcaaccatggcgtcatggtacaaccgcaccgtcatcgcgggcaggctccagtagctgaccgccggaaagatctgctcgatctccaccagcgacgtgtaacgcgtggactcaacgatggtcaaacgatagccggcgccgttcacctgataagtcaccgtttcgcccgcttcgtcgttgcgcggcagcaagcggcgcaattgcgcgaagttggtttcgcacaatctcatcatttcggggaaatcaggggtatagcgctgtttcattagttggcccactcttttcttaacgattcatggtgcaacgccagccattgcaatgcaatcactgatgcggcgttatcgatcgcgccttcctcaacccagcggtaagcctgttcgcggctgaccacatgaacgcggatatcttcatgttcttccgccaggccgtggatgccctcggcggtgccggcgtccacttcgccgaccatgatcgacaaacgttcgctggtgccgccggggctggccagatagctcagcaccggtttgcagcgcccgaccaccacgccggcctcctcctgcgcttcgcggcggcacacgtcctcgacgctttcaccggtttcgatcatacccgccaccatttccagcagccagggcgaattactggtatcgaccgcagcgatgcgcagttgttcaatcagcacaacctcgtcgcgcaccggatcgtagggcagcagcaccgccgcatggccgcgttcgaaaatttcacgcgtgatttcagggctcatttcgccattgaacaaccgatggcgaaaccggtataaattgagtgaaaaaaaaccacggtacagcgtctcgcgtgcaataatttctacatcttttttatcgaaagtaacgggcgatggctgcgaacggttcatgcgcgaattctcctgcttgagtatgccgataaaataaacggttttgatgacagaaacagcgggactctccgccgcggctttatgttaggctgtttttcgccgccggatgcggcacgtttgtgcgctcgcaggtaatagcgggaaacaatccggattgtcagccataatatcagctgcagtcgacccgggcagtacgccaaggtaaatgggcggtctgaaaggtaaaagttacgtgagatggcacattcagccacctgatgcgtacctcagactctgctagaatcggcaactatttcgtctatcgtcagcgctaacatagcaatattgctgcacaacaaggaatgcaaatgaagaaactgctcccccttcttatcggactgagcctgggcggcttcagtgcaatgagccaggcagagaacctgctgcaggtctacaaacaggccagggaaagtaacccggatctgcgcaaaagtgcagctgaccgcgacgccgcattcgaaaagatcaatgaagcgcgcagcccgttgctgccgcagctcggtttaaccgcaggttacgattacaccaacggctatcgtgacagcaatggcgttaacagcaacgtgaccagcggttcgttggcgctgacgcaaaccatcttcgacatgtcgaaatggcgccagctgacgctgcaggaaaagaccgccggcatctccgacgttaccttccagacagcggaacagcagcttattctcaacacggcgaccgcttacttcaacgtgctgaaagcgatcgatacgctgtcctatacccaggcgcagaaagacgcggtataccgcacgctggatcaaaccacccagcgcttcaacgtgggcctggtggcgatcaccgacgtgcagaacgcccgctcgaactatgacaccgtgctggcggcggaagtctccgcccgcaacgatctggacaacgcgttggaaacgctgcgtcaggtcaccggcaccttctaccctgagcttgcctcgctgaacaccgatcgcttcagcacccagcgcccggaagcggtgaacaacctgctgaaagaagcggaagcgcgcaacctgagcctgctgtccgcccgtctgagccaggatctggcgcgcgagcaaatccgcgcagcccaaaccggctatatgccgacgattgacgtcagcgcgtcaaccggcatcagcaataccaaatacaacggctccaataccggtggcgcgaatgccgcacgctacagcgactccgatgcgggccaaaataaggtcggcatcagcttcaacctgccgctgtacagcggcggcgcgaccaattcgcaggtgaaacaagcgcagtacggctttgtcggcgccagcgagcagttggaaagctcacaccgcagcgtggtgcagaccgttcgttcgtcgttcaacaacgttaacgcttcgatcagcagcatcaacgcctacaaacaggcggtgatctccgcgcaaagctccctggacgcgatggaagccggttatcaggtcggtacccgcaccatcgtcgacgtgctggacgccaccaccacgctgtataacgccaaacgtcagctgtccgacgcgcgttatacctatctgatcaaccagctgaacatcaagtcggcgctcggcacgctgaaccagaacgatctgctgctgctgaacggcgcgttgggcaagccggtatcgaccgcgcctgacgccgtcgcaccgcaaaaccgcgcgcaggacgcctatgcagacggctatcaggacaatgcgccgatgcaacagactgcggcgccagcgccggtggccactcgcgcatccgcgccggccgttaccaccagccaaccggctcgccacagcggcaacccattccgcaactgatgtccacacgctgacaaacacggggtccggcctgcgccgcgccccgttttttttgcctcgatttcgccacttctgcccgccgcctcacagccgccgctgcgccaggtgatatcatcgtcactctcgttttcgcagttggatgaggttcgatggacaacgattcacgttggcagcaactgattaacgacggcgaactgccgccgccgctgcgcccgacgccggcggtgtatgcctcctggctgcgctgccgcagcctgatgcagcctgatgtctggcaagcgccgcaccgcgcgcagggcgcgaccttcgaatcgatttgccgccgcaagaacgatctactgacgctcggccaggcggcgctggaagacgcctgcgaatacatggagccgcggcgttgcctgctgatgatcctcgacgagagcggctgcatgctgtggcgctgcggcgacgcccaaacctgggagactctgcagcaactgggattcgcccccggcgcttactgggccgagggacagatcggcaccaatgccccggcgctggcggcggcggaaggccacccggtgcgggtgagcggtgaagaacacgtgcgccgggcgctgcacggctggtcgttctgcgccacgccggtctacgacaacagcggccgccagcgcggctcgatcgccctgggttgcctgctggccgacagcgccgccggcgatctgtcgctgacgctggccatcgcccgcgaaataggcaactcgctgaacgccgacggcctgctggcggaatccaaccgccatctgaatcagctttacgggctgctggacggcgtggacgacggcgtgatggcctgggatcatcgcggctacctgcaatacatcaaccagcgcgccgccggcctgctaaaactggacgagcagcagagccagggcaaaccgctggcgcagttgctgacgctgcccgctctgctcaagcgcgccatcgccgatcggcaaccgctgcaacacatcgaagtcaccttcgaaagccagcggcaatttatcgccgccttgctgacgctcaagccgattttcgacggcgatcgctgcagtttcatcgccctgctgcacccgctcgaacggctgcgccaatatgtcagcagccagctggggcgcgtcagccacagcttcgagcagatgccctccgcctcgctggagatgcggcggctgatccgttacggccagcaggcggccaaaggccagcatccgatcctgctgcgcggggaggaaggcgtcggcaaagagctactcagccaggccatccacaacgccggcgaacgcgccgccgggccgtatatctccctcaactgccaactgctgccgcaggcgcaggggctgcgtgagctgctgggcagcgacgccagcgaagaagaggcgggccagctcagcaaatttgaattggccaacggcggtacgctgtacctcgaacagatcgaatacctgccggcggagatgcagtcggcgttgctgcaggtgctgaaaaccggcgtggtgatccgcctcaattccagccgggtgatcccggtcgatgtgcgggtgatcgccggcagcgccgccgatctgccgctgctggtgcagcaaaaccgcttccgccgccagctgttttacagcctgcaggcgttcgagatccagatcccgccgctgcgccagcggctgagcgatattccgctgctggtcaaacaccatttgcgcacgctggagcagcatttccagtgtcgctttcgggtggatgacgaagtgatggcccagctggctctctacctgtggccgggcaacgatttggagctgaaaggagtggtggagcgcgcggcgatgatttgccacggccaccacatccagctggcggatctgccggcgcacctgctcggccagccgtcgctgctggaaagcgatccgcagcccggcgcaccgctgttgacgctgacagacatggaacgccaggcgatcctgcgcgcagcgaccgtcagccgcggccagctgacggaaatggcgcagctgctgggcataggccgcaccacgctgtggcggaagatcaaacagcacgggatcgacatccgccagttcaagctgcgcgcctagtggctgagctgcaataccccgcgcgcggcgtccagcatcgccttctgcccgctgcgggttttgctcaggcaatcctgcatgccgaccaccatcggaatgcccatcgccttcgccaaaatggcgctgtgcgacagggcattgccgccactcagacagatgccgagcaccagccgcctgtcgagcatcaccacctccgaaggcatcagttcgtccatcaccaatattgacggttctgtcagcgcaataaccggcagcggcagcccctgcagatggcacagcgtgcggcgcagcatgtcgcgcacgtccagttcgcgcgcccgcatgtagtcgtcatccagctcgcggtactcttcggcgatcgcctccagcacctgtctccaggcctgctcggcgctgcacagctgttgcgcgatgcgggtgtaagccgcctgctgcagatccggatcgtccagcagcatgctgtgggcgccgaagatcgccgcctgcggcttgccgatcagcgtgccggtgcgttccgccagccggttcagatcgctcagcgtatgctgtagcgcctcccgcaggcgttgctgttcgcccaatacctcgtccgcgccgatgcgccgctcggacgtgggtggccagaagctgtaagcctggaacaccggcccgctggtgacgctttccgccaccggaataccgtgcagcgaaggctgctgccgctcggagaccgtctcgccaaaatgctgctccgccaacgctttgaacgccgccagcgcctcgtccgcctgcgcgccgtcggcgatcaaacggatggtgtcgccgtgacgcacctgcagcagcgccagctgattgaggctgcgcggatcgacgcactgcccctgcttttccagcaccagctcggccttgaacggcgccagcgtctcgaccagccgcgccgccgggcgcgcatgcaacccgtgcggattctgcaccgtccaggttgcgcttttgccctgcgccagcggcaaggccacggttttcgccgtaggtgaagcctcgcccagctgtgcctgtttgccctgcagcgccccctgcgcctccgctaccacctgctccagtgaggcgccggagttggcggcaaccaccgccgccagcgtgccttcaaccagcggcgccgcacacagccgcactttggcggccagatccgggtccagcagatcgagcgcggtttcggcactgagcagcgcgctgcccagatccatcagcaccagaacgccatcgccgtcggcgaccgcttcgatcgcctccatcactttgaccgcgtcggtgccgatcgggtgctgctcgtcatccacacccgccgccagcgctagtttgcagccgtcgccgcgcatcatctgccgcgccaactgctcaacgccgcgcgccagcaacgcgctgtgcgaaaccaccacgatattaatcatctcgcctcctgctaactgccggcgacctcggccagcgttttcatcatcaacatcaccgaagtggcgccgggatcctggtggccgatgctgcgctcgcccaggtaactggcccgccccttgcgcgcctgcatggtgatggtgctctccaccgcccgctcggcgctgtcggcggcgcgctgcagcgcctccgccacgctcaggttctgctgcgcggactggccgaggctttccaccaccggccaccagacgtcgcacatggtcttgtcgcccggctccgctttgccgcgcatcaccacgccttcaaccccttcctgcatcacctgatgcagctccgtcagatccaggctttgcttggcgttcgccgcctgcgccgcgcggatgaagaaggtgccgaacagcggaccgctggcgccccccacgctcgacagcagcgtcatgccggtgtttttcaggataaaaccgatgtctttgtccgccaccgacggcagtttttccaccaccttattgaaaccgcgattcatgttcaaaccgtggtcggcatcaccgatctcggtgtccaactgggtcagaaaatcgcgctcccggctgaacacctcgccgcaacgcatcagccaatcgacaacctgttgtttggtcaacgccatgattcctcctcagcaaccccaacgcagcgcaggcgttttcaccggcgcatcccacaaggacaacagctcgtcgtccacgttcaacaacgtgatggataccccctgcatatccagcgaggtgcaataagaacccaccaggttgcgttcaatgatgatgcccgcctcggcgcagcgctccgccagccgatggtacacgccatacaactcagacaatggcgtggcgcccagattgttgaccagcgcgatcacccgatcgccgcgcgtcagcggctgcttggtctgcatctcgtcgcgccactcgccctgctgacgatcccagacgcggatcgcgcgctgatagtggccgtggtcgatcaacgtatggaacatgtcgtccaccgccgcgttgagcgtggtgaacgggcggcgcgcaatgcctggctcgccgtgaatgccgacgccgaactccatttcgttctccgccagggtgaacgacggcttgccggcggccggcacggtacaggcgcccaacgcaatgccgattgaatgcccgtggttgttgatgcgatgccccagcgtcaccacgctgtccagatcgtcgccgcgcgccgcggcggcgcccaacagtttctccatcagcacggtgttggccaccccgcgccgcccggcggtaaacaggctgtctttgaccgccacgtcgtcatccaccagcaccgtcgccaccgcgacgccgctgtcgtgcagcagctcggtggcggtttcgaagttgagcacgtcgccggtgtagttcttgatcagcagcagcaccccggcgccgccgtcgatcgcctgaccgcactcgtacattttatccggcgtcggcgaggtgaaaatctcgcccggacaggcgccgtcgagcatcccttcaccgacgaagccgcagtgcatcggctcatggccgctgccgccgccggacaggatcgccactttgcccgccaccggcgcgtcggcgcgggtcacgaacaccggatccgcgtgcaccagcagctcgggatgagcctccgccagcccctgcaactgctcttccaacaccgactcgacctgattaatcagttttttcacgatggtttcctctgtaagaacaggggcgcggcgcaccgcgccccaacggtatcaatgacgctgcaaccaggcggcgcccagcctatccgccgtcaggatcgccgcctgcacgcccgcaggggtgaccttgaacggcatgttgtgaatggtttcacccgcggcgcagctggcctcggccaccgccatcatcttcgccgtcgcatcgccggtgacgcccatctgcgccagcgtgatcggcaagccgatgtcatgacaaaacgccagcacggtttcaatctgcgccatcgggctgttctgcagcaccagttgcgccagggtgccgaacgccactttctcgccgtgatacaggtggtgacactcctccagcacggtgaaaccgttgtgaatggcatgcgccgccgccagcccgctgctctcgaagccgatgccgctcagatacgtattggcctcaatgatgcgttccaccgcttccgtcaccacgccggcctcgaccgccagtttggcttttaccccttcggccagcagggtgtcgtagcacagccgcgccagactgagcgccgccagcgtcgatttgccgccggccatgctggtggcctgcgcgtcgaagcaggcctgcgcttcgaaataggtggagagcgcgtcgcccatgccggctaccagcaggcgcaccggcgctttggcgatgatggcgctgtccatcactaccatgtccgggttgcgcgggtagatcaggtattcagcaaattcgccctgttcggtgtagataaccgacagcgcgctggtcggcgcatcggtggaggcgatggtgggaatgagcaccaccggcagccgttggtagtgggcgacggccttggcggtgtcgagcgtcttgccaccgccgacgccgatcaccccgcggcagccgtgggtctgcagctcgcggccaaggcggtctatctctttacggcagcactcgccgttgaagcgggccgcatgatgtttcacgccgtgctgctgcagactgcccatcagggtgtcgcccgccagctgcatcacaaagtcgtcagcgatcacgaaataatggtcggcgagggatttggcgtattcgccgacggcggacagcgcattggcgccctgaatgtatttgcctggtgactggatgattctcaacataaccggatccttgtagggagttggcgatggtaacgttcagatatcaggtgatgacgcgccggcttcgccgccggcttgttgttgtgcttcgactatgagcgcctgtcgcccgcctggcgagtcacgcgatttttgttccattatggaacatcatcatagcgacaacgtttcatgatgaaacgctaacgcgcgttttttcgccgcgaaagcgaactggcgcacaccccaacgtataactgcgtaaagagtggattctgcgggcgtttcagctttaattttgaccatgtttcccctatccttagcgccactactgggaaagggcgaaaacagcccgcatgatgggattgataacgatgaaacggacaaaaaacatcaaccaagagacgttccgcaaatcctggcgcagctaccgtgtcgcgcccgtggccttggcgatcagcgccgtctttatgctggccggctgcgagaagagcgatgaaacggtctccctgtatcagaatgccgatgactgttcgcgcgccaatccttcgatgagcgagcagtgcaccacctcctacaacaatgccctgaaagaagcggcgaaaaccgcgccgaaatacgccactcgcgaagactgcgtcgccgagttcggcgaagcgcagtgtacccaggctccggcacaggccggcatggcggcggagtcacaaagcagcggcagcttctggatgccgctgatggcgggctacatgatgggccgcctgatgggcggttccggcttcgcgcagcagccgctgttcacctccaagaatgccgccagcccggcgaacggcaagtttgtcgacgccagcggcaagagctacggcccggccaccgccggcggccgcaccatgacggtgccgaaaactgccatggcgccgaagcctgcggtcaccaataccgttacccgcggtggcttcggcgagaccgtggccaagcagaccagcatgcagcgcagcagtgccacctccaactccggctctcgcagcatgggcggttgatgcatgaaacgtattgctattactgagcgcccggactggcgtgaaaaagcgaccgagttcggttttcgtttccacaccatgtacggcgagccgtactggtgtgaagacgcctattaccagttcacgctggcgcagattgaagagatcgaaagcgccaccgccgagctgcatcagatgtgcctgcaggtggtggagaaagtggtcggcagcgacgagctgatggccaagttctgcatcccgaaacacacctgggagttcgtgcgcagctcctggcgcaccaaccagccgtcgctgtattcgcgtctcgatctcgcctacgacggcatcaacccgccgaagctgctggagaacaacgccgatacgccgacctcgctgtatgaagcggccttcttccagtggctgtggctggaagatcagatcaatgccggcaagctggatccgcaatcggatcagtacaacagcctgcaggagaagctgatcgagcgtttcgccgagctgaaagcgcatcacggcttcggcctgctgcacctggcctgctgccaggacagcgaagaagatcgcggcacggtgcaatatctgcaggactgcgcgcaggaagccggtctgccgaccgagttcctgttcatggaagagattggccttggcgagaaaggtcaattcaccgatctgcaggatcaggtgatcggcaacctgttcaagctctatccgtgggaattcatgctgcgcgagatgttctccaccaagctggaagacgccggcgtgcgttggctggagccggcctggaaaagcatcatctccaacaaggcgctgctgccgctgctgtgggaaatgttcccgaaccaccctaacctgctgccggcttatttcgcgcaagacgatcatccgccgatggatcattacgtcaccaaaccgctgttctcgcgcgaaggcgccaatatccagatcgtcgaaaacggtcaggaagtggcgcgcgtcgatgggccgtacggcgaagaaggtatgatcgtgcagcagttccatccgctgccgaagttcgaagacagctacacgctgatcggcagctggctggtgaacgatcagccctgcggcatcggcctgcgcgaagatcgcgaactgatcacgcaggatctgtcgcgcttctatccgcacaccatcctcggctgatcgctccactgaaggtaaaaacgccagtctctgactggcgttttttctttagcccacctgcaccgacagcatgctaagcgcccccatttcgataccgtcgatcggcacgctgatggcctcttttccatcccagctgccgagcacatacagcaacggcagatagtgttccggcgtcggattcgacagcgccgccccctcatggcgcatgaaatccaccagcggatggttatcgccccgataacgcaggttatcccggacaaagttattgaatgattccgcccacgggtaggcgctggtatcgccctgccatttcaccatgcgcaggttgtgcaccacgttgccgctggcgacgatcatcacgccctcgtcccgcagcgcggcgagtttgcggcccagctcatagtgataggccgccggctgcgtgccgtcgaggctaagctgcaccaccggaatgtcagcatcgggatacatcttgatcaggacaccccaggtgccgtgatccaatccccactcgccgagatccgccgttaccggcaccggcgccagaatttgctgcagctgcgcggccagcgcgggagagcccggcgccggatagcgggtatcaaacagcgcctgcgggaacccgccaaagtcgtgaatggttttgggtttttccatcgcggtgaccgcagtgccgcgggtataccaatgcgcggaaaccgccacgatcgccttcgggcgcggcaatgactcacccaacgcacgccatgcccgggtgtaacggttgtcttccagcacgttcatcgggctaccgtggccaagaaacagtgccggcatacgagaggtgttcatagagggatccttagttcaaattgtgctatgccgctacattacgcgctttgccgcagcaacacagccggataaccgtgatgaagatattcaataaatttgaattaaaaagcgcaaaaatgcaccggccaacagaaagttaaaaaacagatacttttcaattaattaataaattccgtgaataccatggcattactgccacacagatctaatttgtgaacaatttatgtattttttgttaacacattcgatacactcctctgtcagtcgacagggtgttggcaacccgtcggcgctacgggaatcacgtctcaccaaggaggaattcatgttcagactcacccgcctgacgctttccatattcttactcgccggctggacggcaagcaccggcgcggcggacaacgcgcagctgacgcagcgcgaagatccttacttccttcaggcgcaaactcagttgcaacagcggctgaagcaaacgccaaacaccaaccgcgccaaaaacgtcattctggtcgtcggtgacggcatggggttttccaccgtgaccgccgcccgcatttttgaagggcagcagcgcggcgtggatggcgaatccaacgtgctggcctgggaggccttcccctatctggcggcggccaaaacctattccgccgacgcccagatcaccgactctgcgcccagcgcggtagcgatgaccaccggcgtcaaaaccatcaacgatctgatgggcctcaaccatacggctaccctcaacaactgcgaggatcagcaaaccaaggccgtcaccacgctgtgggagatggccgcaacgctcggcatgtccaccggcgccgtgacgaccgcgaccattacccacgccacgccgggcgccacctatgcccatatcgccaatcgcgactgggagtctgacgccaaaatgccggcggatgccctggccgcaggctgccgcgacatcgcgcgccagctggtggaaatgaagtacggcaacggcctgaacgtagcgatgggcggcgggcgcgccaactttctgcccgacagcgtgagcgatccggaatatcccggcaagaaaggcgccagaaaggacggccgcgacctgacgcaggtctggatgcaacgctacggcgagcgtgggcaatacgtctggaatcaggcgcagttcgacaaaatcgatccgaccaaagtcgaccacctgttggccctgttcgaaccgtcgcacatgaacttcgagcacgatcggcggcaagacgcggcgggagagccttcgctggcggaaatgaccggcaaggccatcgatattctgtccaggaatcccgaaggctacctgctgttggtggagggcgggcgcgtcgatcacggcagccataacggcaatgcctaccgcacgctgagcgacgcggtcgcgctgaacgaagcggtgaaaaccattgtcgacaaggtcaatctggacgacacgctggtgatcgtgaccggcgatcacagccacacgctgaccatcgccggctatgccaagcgcggcaatcctatcctcggcatttccgtcggcgtcgacggcaaaccacggctgggcagcgacggcaagccctacaccaccgtcggcttcgccaacggccccggcggcacaatcccgctgaccgagcgcccggcattaaccatggaacaggccaccgcgcccgactttattcagccggcgctggtgccgctgaacagcgagacgcacggcggggaagatctcggcatctacgccatcggcccctgggcccatctgttccagggcacggtggaggagaactacaccttccatgtgatgaattacgccagccgcatcggcgaacgcctgtcaaaacgctagccacaaaaaaagccgctttacgcggcttttttatcgttgaaagcggccggcgatcagctggcttttttctcgtgcgcctggcggtaggccaccagatcttcgatggtcagcaccaccatgtcgtgctgtttggcgaaggtaatcacttccggcgcatgcgccatgctgccatcgtcgttggtcagttcacacagcacgccggcgggtttgaaaccggccatggaaaccagatcgatggtcgcttcggtgtggccgcggcggctcagcacgccgcccggctgcgcgcgcagcgggaacacgtggcccggacggttcaggtcgctcggcttggcgctgtctgccaccgccgcacggatggtggtcaggcgatcggaagcggaaaccccggtggtcacgccctgcgccgcttcgatggtcacggtgaaggcggtctggaactggctggagttgttggtcaccatcatcggcagctcaagctgctgacggcgttcttcggtgatgcacaggcacacgatgccgctgccgtggcgaatagtcagcgccatctgctcaacggtcatggtttccgcggcgaagatcatgtcaccttcgttttcacggttttcatcatcgagcaccattacgccgcgcccgttgcgcagtgcgtcgatcgcgcgttcaacgcgttctgttggcgtgccgaagtctgaaagtagcgtctgattcatggtaaaaaacctcattaaaaattatggattaccagaaccagggcgatcttgaggagtagctagcaatagctaaaaaaataacgcaagcgggcgcatgcccggcagataccgttactctctcccatccggactataaccgtcggccccggaattacaccggatctgctgacctctaaccggcctttacaggctggctgagcgctcgcgggctttcaccgtagaaggtgatttaccgccggtggggactttcaccccgccctgagaataagcaagatgactataacgctaatgggtagacagggcaattggcaaaagcacaattcggccacgtgcggcgaatgcgcttaatggtttatccggcgggcaactcgcattacactaagcggcagctattaaactctgaaagggatacgccatgattgacccgaaaaaaatcgaacaaatcgcacgccaggttcatgagtccatgcctaaaggcgttcgtgaattcggggaagacgttgagaaaaaaatccgtcaggtgctgcagtcgcagctgacccgtctggatttggttaaccgcgaagagttcgacgtgcagactcaggtgctgttgcgcacccgcgagaagctggcgctgttggagcagcgcatggccgagctggaaagcaagctgagcgcggcgccggccgccaagcaggaagacgaataattcccgccaagggcgcgcaccgcgcgcccttgttctttagattgcccggcgttagccgcgcccgtctttgatcgctttgatgatgttggtggtcgacaggccgtcttcaaagttcagcactttgacatcgccgccgttggcccacacttccgcactgccggcaatctcttccggcttgtaatcgccgcctttcaccagcagatccggcaagatgtcggcgatcaagcgctgcggcgtgtcctcctcgaacggcaccacccaatccaccgcttccagcgcgcccagcacaatcatgcggttctccagcgcgttgaccgggcgtttttcccctttcagacgcttggtcgaggcgtcgctgttcaccgccacgatcaggcgatcgcccagtttgcgggcgttggccagataggagacgtggccggcatgcagaatgtcgaagatgccgttggtcatcaccactttctcaccgcgctgacgcgcctgcgccacggcgtttttcaactgtgcttcggtcatcacgccaaagccggtttcggcgcggccgcgcaccgcgttttccagctcgatcggcgacacggtagacgtaccgagcttgcccaccaccacgccggcggcggcgttagccaggaagcaggactcttccagcgaattgccggcggccagcgaggcggccaatacgccgatcacggtgtcgccggcgccggtcacatcgaacacttcctgtgcctgggtcggcaagtgcagtggctcaacgccaggctgcagcagcgtcatgccgtgttcggagcgggtaaccagcagcgccgacagctcgaaatccgccaccagcttcatgccgcgttccaccagttccgcttcatccttacagtggcccaccaccgcttcgaactcggacaggttcggcgtcagcagcgtcgcgccgcgatagcgctcgaaatcggagcctttcggatcgatcaacaccggcaccttggcggcgcgcgccagttggatcatgccctgcacctggctgagcgcacccttggcgtaatcggacagcaccagcgcgccgatctgcggcagcgcctgctgaatgcgctccagcatcggctgcggatcaacgttggagaagccttcttcgaagtcgagacggatcagttgctggttgcgcgacagtacgcgcagcttggtaatggtcggatgggtcggcaccgagacgaagtcgcagcgcacgttgacttcattcagcttggcgctcagcgcccgcgccgcatcgtcgatgccggtcaggcccaccagacgggaagtggcgcccagcgaagcgatgttcatcgccacgttagccgcgccgccgggacgctcttcgatggtatcgaccttgaccaccggcaccggggcttccggtgaaatgcggctggtcggcccataccaatagcgatccaacatgacgtcaccgaccaccagcacaccggcgcggcgaaaatcaggcagcgtaactttcatccgataactccaaaaaagaacaaaattttagtggcgcagatattaccacagaccgccggaatacccgcaaaaaggtattaatccagccatttggcccagctggcgcgcacctgctcgcgctcggcggcaaacagctcgctgccgaccttgccggaatgttcctgcagcgccaggtggtggatctcgtcgcgcatggtgacataagcctgggtcagcgcacgcgcctcctcttccggcatgatgtcgtaattggccatcagctcgaagatacgcacgttgtccgaccaacgcgtcaggcgcggttcacccggcgcatagcgtaagaccagatattgggcgataaattcgatgtcggtaatgccgccctcatcggttttgatatcaaacagatcgcgctgtttgttgccgagatggttgcgcatcttttcgcgcatctcgcgcacttcacgcttcagcacctgcgcatcgcgcgttttgcacaggatctcgcgccggatcgcgtcgaactgctgatgcagcgccggatcgccgtgcacgatgcgcgcgcgcaccagggcctgatgctcccaggtccaggcttcgttttgctggtagtcggcgaatgcctcgacggtgctgaccaacatccccgcggcgccggaaggccgcaggcgcgcgtccacctcatacagaatgccggaggaggtgcgggtgctgaacagatgcatcacccgctgcgccagccgcaggtagaactggcggccgtcgatgcagcgatcgccgtcggtcatcacctccggcgggcaatccaacaggaatactagatcgagatcggaactgtaccccagctcccagccgcccagtttgccatagccgattaccgcaaagccgcgcccctcccgctcctgcaaatgggtgggctggccgtagcgcgccaccatgtcgctccaggcctgttgcaccaccgcgtcgatgatcgcctcagccagataagtcaggtgatcgctcactttcatcaccggcagcgccccggcgatatccgccgcggcgatgcgcagctgctgcgcctgtttgaactggcgtagcgcctccagcttttgctcttcatcgtcttccggcacccgcagcaggtactgacgcagctcgctgcggtaggcgtccagcgccaccggctgatacagcgtggccggatccagcagttcgtccagcaacagcgggtaacgcgacagctggttggcgaccatcggcgacgcggcgcacaggcggatcagatggctgagcgccgcatggtactccaccagcaactcgaggtaggtggtgcgggtgacgatgctgagcagcagctgcgccagccgcaccagcgcggtcggggcgtcctggcgcgggcatacctccgccagcaggcgcggcatcagctgatcgagcacgtcgcggccgcgcgggccgatggtgcgcttgtcgacgtcgtggcggaaatcggcgatggtgcgcagcatctgtcggcgcccctcttcgtcgaggtgcggcgtcagcggtgccagctcgttctcctccagcgcgtcctgccacaggctgtggtagtgctggtagtcgggatcttcaccgacatccgggctatcgtcgccgatcaggtcgtcgaacaccgcgcgcaccgcctgcatatgcacctccagcgccgccatcagcgccggccaatccgccaaccccatgccgtaggccaaccgcacctgatcgagcgcctcctgcggcagcgtctgggtttgctgatcgccaatcgcctgcagcaggttctccagccgccgcaggaacaggtaggcggcgctcagcgcccgcacctgctcactttccagcagccccagctcacccaccgcctgcaacgtcggcaacagcgaacgcccctgcaacgccggttcacggccgccgcggatcagctggaatacctgagtgatgaattcgatttcgcgaatgccgccggcgcccagcttgatgttgtccttcaggccgcgccgccgcacttcacgggcgatcatgcccttcatgttgcgcagagactgaatgacgctgaaatcgatgtagcggcggaacacgaacggccgcagcgttttgcgcagctcctggctgtaggcgtcttccgccccgcccatcaggcgcgcctttaccatcgcatagcgctcccaatcgcgcccctgttcctggtagtaatcctccagcgccgcaaagctcatcaccaacgggccgctgtcgccgaacggccgcagccgcatgtccacgcgatagacgaagccatcgatggtctgttgatccaacgccttgatcagccgttggccgaggcgggtgaagaactgggcgttatccagctcgcgtcgcccgccctgggtttgaccattttccgggtaagcgaagatcagatcgatgtccgatgagaagttcagttcgccgccgcccagcttacccatgccgaggatcaacagcggctgcggctcgccggcggcgttgcacggcgtgccccattcgcggcagcaggtttgatacagccagtcgcgcgcgctgacgatcagcgtctccgccagcccgctcagctgcagcaacgtttcttcggtcgaacacagcccctgcgcctgcgcccaggcgatgcgcaccagcgtttcgcggcgaaacagacgcagcgtgcgcatcagctgcgcttcgtcgcgcacctcttccagctcgtcctggagccaggcggcatagtgttgccactcaccgggcgccggcggctgttcgcgcagcgttgccagccaggccggctgggcgagcagcgcgtcgctgacgaaatcgctcgacgccagcacccactgctcctgctcgctaaaggcgcagtccgcgccgtgaacttcctgaaaacgctgcacaacctgctgtgcctgagcctgtaacgcggctgaaagtggcgacatagtgtatgacccgttctgcggcccacggctggcgggccggctggattaacgaagcgcgccgtttaaccagaatggcgcatgcgataaggcctgtttgcggctggcttcataccagccctggcggcgctcgctcagcgccgcctgcagctcacgccaggcgtcgatataaggcccggtctgctcgtcggggtaagcgcccgacagcaggaccagcgccgaaatctgacgcgtcaggcgcggcaattgttcctgatattcatcttcgttcagcgtacggctgaaggcctctttcagctccgcgccgctgcgccccagcatgatgtcgctgaagcgtttgaaagaaccgtccagcttggcctgcgctttggcgtcgataaacggccgccaggcgccgcgcaccaaccatgatgtgagcgccaacttacattgcaggtagaccgcgctgtaacacagggtctccggttgcgcggttttgtccgccaacagcggttcgagctcggtcaggcgggcgcgcagatcggcactggccttgcgcggcaccaggccgccgaagatcaccagcgcctggcggatcgtgccaaccgcctcaatcaccgaagcgcgcgcctgcgcgtcgccgcgcagccacagctcttcatggtactgccagtggttgagcgccagctcgaaggcggcgatcatcccctgctccacggtcgccttcgccgccggcttcagcacccgcagcgggcgcacctcacgcggcggattgccctgcgccaggtggtaaccgcgcgccgccttgctcaggctgccctgacgcagcccgtcgtgcgccgccagctcaccggccaacgccagcagatcggcggtattgcctttcagcagctccagttctatctcgctcagggcttcgctgaggccaccagcacgcacttctccctgatccaggccaatctctatctcgctttggccgtaagtaaccacccacttctcacgcacgaaatccgtacggaacagcggttgcaacgcctgctgcagcgccgcgatatcgcaatcctgcggccagatgtcggcaggaaactgcgccaacgccagctgcggctcggcgatagcgacattgtattccgggcgctggtgcaggccgcccaccactttaccggcggttttgatggtcatctcatagcgatcgtcgaaaccgcgaatgcgcagccccatgtcgtgactgcgcaggaagttgtcggccgtttcgaagtaaatgttggtcagcttttgcggcgcggaatgctgatgcggccaggcggcgagccagtgtggcagagcggccaccgcttgcggcgcggcgatgaatttcagttcaatttcaacggtcataattctttaacaccaataagttacgcattcgcgtcggtttcagcgcggcgcgctcggcccgccgtatgctgcccactgacgcacagttgccgttatcttaccgcgattcccggcgccttaaccctgctaactgtagaaaaaacctgttacgttataaaacgctgcgcaactcacagaatcagccacagtaagatagttctcattccggttttggcgttgcgtcgtcagactgaaccctctactatcgttccataaattcacccagaaacgatgaactaatgcagaaattacgcctgattttccttgccgcgctgagcttcagcatcacttgggccgcacatgccgaagataaacgctatatctccgatgagttaagcacttacgtccatagcggcccaggtaatcagtaccgtattgtcggcactctgaacgccggtgaagaagtgaccctgctgagcgtcaacgacagcaccaactacggccagatccgcgatccgaaaggccgcaccacctggatcccgctcgaccaactcagccagacgccaagcctgcgcacccgcgtgccggagctggaacagcaggtgaaaaccctgaccgacaagctcgccaacatcgacaacacctggaaccagcgcacggcggaaatgcaggaaaaagtcgcaggcagcgacagcaccatcagcagcctgcagaaggaaaaccaggatctgaaaaaccagctggtggtcgcgcagaagaaggtcaacgccgttaacctgcagctcgacgacaagcagcgcaccattatcctgcaatggttcatgtacggcggcggcgtcgccggcgtcggtttgctgctgggtctgctgttgccgcacctgatcccgcgtcgcaagaacaacaatcgctggatgaactgatctcagtatcgttcagtttgagtttgggcgcctgcgggcgcctttttcattggcgccgacatcccgcggccaattcatgtaatctgatagacagagccttacacgatattcaggagtcaacagtgcagatttatctggtcggcggcgccgttcgcgacagcctgctcaacattccggtggtcgatcatgattgggtggtggtgggcgccacgccggcggagctgctggcgttgggctaccagcaggtcggcaaagattttccggtgttcctcaatcccgatacccacgaggagtacgcgctggcgcgcaccgagcgcaaatccggccaggggtacaccggttttacctgctatgccgcgccggacgtcacgctggaagaagatctgctgcggcgcgatctgaccctcaacgccatcgcccgttccgccgaaggggaactgattgacccctacggcggcgtggccgatctgcaggcgcgcgtgctgcgccacgtttccgacgcgttcggcgaagatccgctgcgcgtgctgcgcgtggcgcgattcaatgctcgcttcgcccatctgggttttcgcatcgccgacgaaacgctggccttgatgcgccggatggcgcacagcggtgaactggccgcgctgaccgccgaacgcgtctggaaggaaaccgaaaaggcgctgcaaagccagagcccgcaggtctattttcaggtgctgcgcgactgcgatgcgctggcggtgctgttcccggaaatcgacgcgctgttcggcgtgccggcccccgccaagtggcatccggagatcgacaccggcgtgcatacgctgatggcgctggcgatggccgcccgcctcactcccgaggtggacgtacgcttcgccaccctgtgtcatgacctcggcaaaggattgacgccaaaagagttctggccgcatcaccacggccacggcccggcgggcgtgcggctggtcgaagcgctatgccaacggctgcgggtgcccaatccggtgcgcgatctgagcaagctggtggccgagtaccatgatttgatccacaccgtgaacaagctgcggccggagaccctgctgaagctgttcgacgccatcgacgtctggcgcaagccccaaaggctggagcagatgatcctgaccagcgaagcggacgcgcgcggccgcaccggctttgaggagaatccttatccgcagggcgactatctgcgccaggcgtatcaggtggcgaacgcggtatctattaaagaggtggtagccagcgggctgcagggcaccgcgatccgcgatgagttcaaacgccgtcgccagcaggcgctggccgactggaagctcaaccaaaccatcctcaacgatcaggcataaaaaaaccccgcagagcggggttttttcttgccatcgggcttacaggaataccatgtaaaccacggccgccacgataaagcggtagatggcaaacggcacgaacgagatgcgtttgatcagcgacaggaaggtcttgatcgcaatcagcgccaccacgaaggcagtaacgaaaccgacggcgaacatcggcagatcaccccaggtcaggaagtgcaggctcttgtacagatccagaccgctggcgccaatcatcatcggcaccgccaggatgaaggagaactcggacgccgcatagcggtttacgcccaccagcataccgccggcgatagtggaccccgaacgggagaaacccggccacagcgccaggcactggaagcagccgatcatgaacgcctggcggtaggtgatgtcatccagcccttccgctctcggtgtcttcggcttcagccattccgccgccagcaacagcaggccgccgacaaccaacgcgtacatcacgtttttcggcgcgaacagcgatttaatcacatcgtggaataccagacccagcaccaccgccgggatcatcgccagcaggatatgccccagcttcagctggccgctggttttgccctcgtgctccaccggcttgccgccgaaatggatgccgatcaaaccgaacaaccggcgccagaacatcacgacaacggccaggatcgaccccaactggataatgacttcaaaggttttggctttgtcgccggtaaaacccagccactcgccaacgataatcatatgcccggtggaagaaaccggcaaaaattcggttaacccttcgacaaccccaagaacaaacgcaataaacagtgaatgcatgtcagccatgtgcttcgctcaccccataaaataacggccatcacataaaaaagcggcagtgcttaaaagacaatgccgctaaaacaattctcaggattaagaccagattaacggtctttcgttgcaagcagatgacataaaatcatgcgggacgagtgccgcgctcaatgatcacgccgacccgattggcatgtgctacagcgcccggtttgctgaccttaatacggacccacggggaattgaagcgctgaagcaaaatttcggatatttcctccgccacgcgctccaccagcgcgaaccggttcgattcaacatgctggatcacggcgtcgctgacatcggcatagctcagacagtcatttacatcgtcgctggcggcggccggccggttatcccagcccatttcgatatcgaacaccagcttctgacgaatgccctgttcccactcataaacgccaatggtggtaattacggtaagctcttcaataaatacgatatccatcacgtcattctctgtttttggccttgccggataccacttccagcggaatgtgcgtattatccatagatgttgcgagtaaaacgaccattattaaacggaaccgcgttatgagtgctaccgcgcttggcatgattatcttcgcgtatctgtgcggctcgatttccagcgcgatcctggtttgccggatcgccaggctgccggatccgcgtgaacatggctcaggaaaccccggggcgaccaacgtcctgcgcatcggcggccggctggcggcggcggcggcggtgctggtgttcgatattctgaaagggatgctgccggtctggctggcctacaaactcgatgtgccgccgctgtatctgggcctgacggcgatcgccgcctgtctggggcacatctatccggtgttcttccacttccgcggcggtaaaggcgtggcgacggcgtttggcgccatcgcgcctatcggctgggatctgaccggcctgatgaccggcacctggctgttgacggtgctgctcagcggctactcttcgctcggcgccatcgtcagcgcgttgatcgccccgttctacgtctggtggttcaaaccgcagttcaccttcccggtagcgatgctctcctgcctgatcctgatgcggcatcacgacaatattcagcgcctgtggcgcggccaggaaggcaagatctggggcaagttccgcaagaagaaaaacgacgcggataacggcgaccagccgagagaggaataacagaagggccggataatccggccctttgctttataccgcaggcagttccgccagcggccagcgcggccgcaccgaaacgctcagcgccgggttggcgccgctcttcaggcgcaccatgccggcataggcgatcatcgcgccgttgtcggtgcaaaattcagggcgggcatagaacacctccccgccgcgtttctgcatcatctccgccagtttggcgcgcagcgtgcggttggcgctcacgccgccggccatcaccaggcgtttgaagccggtctgctccagcgcgcgtttgcatttgatcgccagcgtatccaccaccgcatcctcgaaggcgcgggcgatgtcggcacgcgtctgatcgtcgttgccgttggagcgaatggtgttggcggcaaaggttttcagcccggagaaactgaagtccagccccggacgatcggtcatcggccgcgggaaggtgaagcgccccgccgtgccctgctgcgccatcttcgacagcatcggcccgccgggataatccaggccgagcagcttggcggttttgtcgaacgcttcgccggcggcatcgtcgatcgactcgcccagcagttcatactcaccgatgccggtgacgctgatcagttgagtgtggccgccggagaccagcagcgcgacgaacgggaacgcgggcgggttgtcttccagcatcggcgccagcaggtggccttccatatggtgcaccggcactgccggcacgttccaggcgaacgccagcgcgcgccccacggttgcgccgaccagcagcgcccccaccaggcccggcccggcggtataagccacgccgtcaatatcggccggggtcaggttggcctctttcagcgccgcctgaatcagcggcacggttttgcgcacgtgatcgcgggaggccagttccggcaccacgccgccgtagtcggcgtgcagcttcacctggctgtataattggttggccaacaaaccggtttgatcgtcatacactgcaattccggtttcatcgcaggacgtttctatacccagtactcgcattacatttcccatcattcacgtgcggccgccagtctaccacattccgccgcatttaccgccggtgcggcgcatcttgtcaccggcttgcgcctatgtcgatgattcatccagaaaatgcctgagcgattaaacacgagcatttttttctgattagtctataatcagcgcccggtgcaaaattgcgcacgttgcggcagagcgacgcgggtttcaatttgctgtgatgctttacaaagcagcatccattggagtaaaattccgcaccattttgaaaaggctggcgcttggccagcaacaaaccgaattttattgaggtgagaggcacatgccggtaattaaagtacgtgaaaacgagccatttgacgttgctctgcgtcgtttcaaacgctcttgcgaaaaagcaggtgttttagctgaagttcgtcgtcgtgagttttatgaaaaaccaactaccgaacgtaaacgcgctaaagcttctgctgtgaaacgtcacgcgaagaaactggctcgcgaaaacgcacgccgcactcgtctgtattaattcttcgggggcaaccccaccgcgtgaatttctgattttcaaaatcgcgcagaccgagtagttgcatacgaaggccgtgctttccgaaaggaatgcgcggcttgttctcgtttataggctaatgaagtaagggcttatggctggacgaattccgcgcgtatttatcaatgacttgctggctcgcaccgacatcgtcgatttgatcgacgcccgcgtgaagctcaagaagcaaggcaagaactatcacgcgtgctgtccgttccaccacgaaaagacgccttcctttaccgttaatggcgaaaagcagttttatcactgttttgggtgtggtgcgcacggcaacgccgtcgactttttgatgaattacgaccgactcgagtttgtcgaaaccatcgaagaactggcgaccatgcacgggctggaagtgccttacgaagcgggcaccgggccaacccagatcgaacgccatcagcgccagagcctgtaccaactgatggaacagctcagcgcgttctatcaacagtcactgcagcagtcctccggggcgccggcgcgcaactatttgcagcagcgcgggttaagtgacgacgttattcgccatttcgccatcggcttcgcgccggcgggatgggacaacgccctgaagcgtttcggccgcgacgccgactcgcgccgcgcattgaacgatgccggcatgctggtgactaacgatcaggggcgttcatacgaccgtttccgcgaacgggtgatgttccccatccgcgacaagcgcgggcgcgtgatcgccttcggcggccgcgtgctgggcgacggtatgccgaaatacctgaactcgccggaaaccgaagttttccataagggccgccagctgtacggcctgtatgaagcacagcagaaccaccctaccctgcagcggctgctggtggtggaagggtatatggacgtggtggcattggcgcaattcggcatcgattatgccgtcgcctcgctcggaacctcgacgacggcggaacacattcagctgttgttccgcgccaccgacaacgtcgtctgctgttacgacggcgaccgcgccggccgcgaagcggcctggcgggcgctggaaaccgcgctgccgtacctgaatgacgggcgccagctgcggttcatgtttttgcccgacggcgaagatccggacacgctggtgcgcaaggagggcaaagaagccttcgaacagcgaatggagcaggcgcagccgctgtccacgttcctgttcgaaagcctgctgccgcaggtggatttaagcagcccggacgggcgcgccaagctgagcacgctggcgctgccgctgattactcaggtgccgggcgaaacgttgcgcttgtacctgcgccaggagctcggcaacaagctggggctactggacgacagccagctcgacaagctgatgcccaagcaggctgaaaatgcgaatccttatcaggcgccccagctaaaacgcacaaccatgcgtatactgatagggttactggtgcaaaatccgcagttggctacacttatcccttcgctggaagggttggagcagaccaaacaggcgggattgccgctgttcgtcgaactggtgcagacctgtttggcgcagccgggcctgacgaccgggcaattgctggagctgtatcgcgacaacaaattcagccagcagcttgaaaccttggcgacctggaaccatatgatcgttgaggacatggtcgagcagacctttttggatacattggccagcctgtacgactcggtgctcgagcaacggctggaaacgctgatcgcccaggccagaacgcgcggtctaagcgcggaggaacgtgaagaagtccgttctctcaaccaggttttagcgaagaaaaactgaataccaaacggcttaagtgccgataattgcgagggcagagccctgcacagtgccgccatagtgggccgcggcgataacgaaaacgccccaaatgctattgttggcggtttcgccgaccgacaccaacctaaatactctgaagtgtggataccgtcttatggagcaaaacccgcagtcacagctgaagctacttgtcacccgtggtaaggagcaaggctatctgacctatgctgaggtcaatgaccatctgccggaagatatcgtcgactccgatcagatcgaagacatcatccagatgattaacgacatgggcatccaggtgatggaagaagcaccggacgccgatgacctgctgctcgccgaaaactcgaacagcacggacgaagatgcggaagaagccgccgcacaggttctgtccagcgtggaatccgaaatcggccgcaccaccgacccggtgcgcatgtacatgcgcgaaatgggtaccgtcgaactgctgacgcgcgaaggcgaaatcgacatcgccaagcgcatcgaagacggcatcaaccaggtacagtgctcggttgccgaatacccggaagccatcacctacctgcttgagcagtacgatcgcgtcgaagcgggtgaagcgcgcctgtccgatctgatcaccggcttcgtcgatcctaacgcggaagaggacatcgccccaaccgccactcacatcggttctgaactgtcgagcgaagagcaagacgacgacgaagaagatgaagacgacgaagacgacgacaccgaagacgacaacagcatcgatcctgagctggcgcgtcagaagttcgccgagttgcgcgatcagtatgaagcgacccgcctggtgatcaagaaaaacggccgcagccacgccagcgccgcggacgagatcctgaagctgtctgaagtgttcaagcagttccgcctggtgccgaaacagttcgacttcctggtcaacagcatgcgcaccatgatggaccgcgttcgcacccaggaacgcatcatcatgaagctgtgcgttgaacagtgcaaaatgccgaagaaaaacttcgtcaccctgttcgccggcaacgaaaccagcgattcctggttcgaagcggcgctggcgatggccaagccatggtcggaaaagctgaaagacgttgctgaagacgtgcagcgcagcctgcagaaactgcgtcagatcgaagaagaaaccggtctgaccatcgagcaggtcaaagacatcaaccgtcgcatgtcgatcggtgaagcgaaagctcgccgcgctaagaaagagatggttgaggccaacctgcgtctggttatttctatcgccaagaaatacaccaaccgcggcctgcagttcctggatctgatccaggaaggcaacatcggcctgatgaaagcggtagacaagttcgaataccgccgcggctacaagttctcgacgtacgccacctggtggatccgtcaggctatcacccgctccatcgccgaccaggcgcgcaccatccgtattccggtgcatatgattgagaccatcaacaagctcaaccgtatttcgcgccagatgctgcaagagatgggccgcgagccgacgccggaagagctggccgagcgcatgctgatgccggaagacaagatccgcaaagtgctgaagatcgccaaagagccaatctcgatggaaacgccgatcggcgacgacgaagattcgcatctgggcgacttcatcgaggataccaccctcgagctgccgctggattccgcgacctctgaaagcctgcgttccgccacccacgacgtgctggccggcctgaccgcgcgcgaagcgaaagtgctgcgcatgcgtttcggcatcgacatgaacaccgaccacacgctggaagaggttggcaagcagtttgacgttacccgtgagcgtattcgtcagatcgaagccaaggcgctgcgcaagctgcgtcacccaagccgctccgaagtgctgcgcagcttcctggacgattaagtccggctgccgcacccaaaacaaaaaccccggcctgccggggtttttttatgcctcagaacatgctgttgccgctggcggtcttctccggcaccggctgcgtcacgtcccagtgttcaacaatctttccggcgctgtccagacggaagatatcgacgatcgccgcggtcttgccggcctcgcgcccgctgacctccacatgcaaaatcacgaagtcgccgtcgacgaacgcctgtttcacctcactgtgcgaattggggtaacgcgttttcagcagctcgacaaattgacgaaaacccgccacgccgtctttggcgttggggttatgctgtttgtactgttcgcccaaaaacggccgcgccgccgcaaaatccttgttgttcagcccctgtcgataaaactccagcacgttctgcttgttacgcgcttcctgcggcgaatgccccgcctgtgcggcgccggtcaccaacagcagcgccatcaaacagcctttcatcatcgatgtcatcgcacactccccttatctcattgcagcgccaggaacagctcacgatagctggcggtcagttgctccaacgtggcgcgattcaatccgctgggattgggcaatacccacacctcggtttcccccagcataagcgtctgcttgccccagggcgcgtttttcaccccaaaggcggtggtgaacgcctgcttgcccagaatcgccagcgcacgcggctgatagcgcaggatcttctcttgcagcgcctcaccgccgctgcgcaactcgtcgcgcgacagctcgctggccgccaccgtcgggcgcgccaccagcgcggtaatgccgcagccattatccttcagctgctgccactgctccggcgccagctggctcttggtaaagccggcctgatggatcaccttccagaagcggttgctgccgttggcgaaaggatagccctgatgggcggaagaaaggccggggttgatgccgcaaaacaccacccgcaggttgggcgccagaagttccatgagtatcgtgagtccattgcagggatttactgcggttatcgcaaaatccgccagcaattacaacaggctagaactgcgcagaaaagcaacatacgggcgggtaacagtagaccgatgcttaaggattccctataatctcgcggcttggccccttagctcagtggttagagcaggcgactcataatcgcttggtcgttggttcaaacccaacaggggccaccaaatttttgcttatacaacagcatgttaagccacctctccagaggtggctttttactttcagatagctagtacctcaaaattgcctcaccagtaaaggcaacagccccacgcaaggcacgcacctcgatgattttcggctcaaaaggatattgtgtaatggccttgaaaaagtgcaaagaatgtaaacatgaggtttcgacatcggcccaaacttgcccacactgcggagctaaaaccagcttagtcattaaattcgcagaaactgcgcttgggataataggtctggctattatcatccctattctttatctgattttcttcagctgagcagatgcaaaaaacgaaacattacgattttcaggtataaaaaaacccgcatatagcgggttatctctctaagccgatcacatccacataacctgttgctgtcctgccacactggcaccaacaggatgcggcggaactgcgtcaactctcccaggtgtcattatcgcgcattgatatgtttccatcgttttgaacgtgtggccgcaattgatgttttggcactgatgataacgctctttcgtttgttggctcagatagcggctggtgcgggcatgggccgccgttcggcaaagcgggcaatgaaacatgtttaattcctcgtcactggctcaattgccgcgataataccgctcgcgatcggaaacaaaagtaactttaagctaatttacaattataaaattaacctcaagctacatcataagtcacatccgatagcaaaacctcaaactccagcgccgtcgtaaagccgctattgctgagattgtgtgtgactttgctcactatccagtcttgcgcatcgatcgccgctttaaacccgctgacgcgtaccggcgtttccggcgtgatgttggcacgccccatggctagcgacagcgagaactccgccacaccgcgctgaagcttttcccacttcgcctgtgctgcccgcatcgcggcggccttggtggcgtaaattttggtgatcgcaaacacgttatcgtcagcccccaccagataatcgcctttcgctgcctccgccggtttccccggttttttactgctacccggtttcgccttcgggtgttgcagcgcgcgcaaatgctgctcttttggcttgcgctgcagcttcactttcttcggcttcggctgttttgtattgagccagctcgccgttacgccggtgtaggcatcccgatcggcaatgctgaaactgtgctgatcgccatcctgccgggtgattgtatacaccggcaatggcttcccgcctaccgtgacgccgttccccggtcgcaacaacagcagagcgccatttttcaccgccgccactgcgccgttgagcgttgcaagtcgggtaataaatgccgcgtccgtctcctgcgtctggtcgatatggctgattttgatggtgcccagaccggcggccagcgaggctttcagcttattacgcgcagccacctgctgcacgatgtcgcccagggtggtgtcgtggtaggactcatcgcgccgggtgttcagcgagccgcgaaaatccgcactacgcgcgcgaatagtcaacgtgtccggcgcgccccggtgttcgacctcatcgaccgtaaactggccttttggcgtcaatggcgagccttgccagccgagcgccagcgacagcaccgcattgcgctgaggcatcgccatcagtccgtcgctgtcgtccagttcgatgtcgagctggtcggcctcaaagccccggttatccgtcagtgataaagaaatcagccgcttgcggatgttctgcgtgatgtcgttatcctgcagcaacagcgagaaatccggggcaactcgcgccccggctggcaggcttacgccggtgatcatgataacaaccctcccatagcaccggcggccttcccggccatctctccggctttatcgtacagttccccggcctgctggcgcagatcgccaaacatcgcagacagggactcatcgacccgcttcaggttgagcgtgaactctgtgcgacgcgggctgccgtcggcgaaaaactcggaatgcgtttcagaaatcgactcgatcacaaacatgccgtaaatcgtaccggttccctcaataagcggccacgcccggccctgctcggccatcagttgcagcgtcagcagtgaccagcgtccgccggtgatctccggcaacagcaccccggacagcgtgattttttcctcatccatccccagaaattgcgctgccgggcgcaggccaacgcgggcgttgctcggccagcgatattccgcgttgcggctcatggactgatacggcagcgtctgcagcataaaaacaaacagccccagcgttaacatcatcatgaatctccgtaagtcatgcggctacgcgcggcggccgcgtgtttgcgtcgttcggcctcgagctggcgcgatacttcgcgcgcaatggaggccgcgtcttggccgggggcgccgtacacctgaatcgtgatcggggctggcgccgtggcaggtgcagcagccggggccgacgccatcaccggcgttgacagcgataacatcgccgccgacagcgccgccgttttccggcgcccggtgacgttggccgggccgttgactatttccgggccacgctcgccgacgatgccgaactggccgcgcgggatgatgccgcccttgtcgaatgcccccgcatagcccggccccggcatcagctcaggcgccgggcgattgtatgaaatcgacgggttaacctccgcctcatcgtcgccaaacttcatccagtcaggcagcatatccgtgaggctggaaaacttatctttcagcgcctgccagcgctcgctaatgccgtccatgatgccgttaatcatgttcatcccggcttctttgaacttgctcggcaacgccttggcggttccaacaagatcatcccattggcccgtcagccatgccttgaggttttcccatgcttcccttgtcgcttgtttaacgttttcccacgcctccgccgtcgcggcagtaatcccagcccatgcccccagggtggcattttttatcgtttcccagaccgcctggaactttggccccagcgtttcccagttctgccagatgtaaacggccgccatggcaatcaagccaatcaccgccagaatggggttagccatcatgatgcggcccagccacatcaccgccgttcccacaaagcgcagtccctttaccagaccgacaaacgacaaacgcccagcgattgacatcagtttgagcataccgccgcccatcgttagcagggcgcggcccaccacgccgccggtaaacttcatcacggtgccaagcccacgggcggcgccgatcagtcccttaaacgaaaacttagcggcaactccgctcagcctaaacagccctttggttaggtttagtgttggccccattaacaaactaaaaccggtgattactggcccggccagaaaccccagaattgccattccgccgatcactgccgtaagcgccagcaccagcttaaacagcgtgccggacaactccgggttatcctttgcccactgaccagcgacgccaagccattttgttgcactttgggtgagtttcctcagcccggagtcctgtttatcgaacacctcgatctgaatatcctcaaaggcagaggacatattttttaaatcaccgtcgaggttatccgttttcgtcttggcaatcttttctgttgcccctttggagtccgttaccgtctgttttttcgcgtctaatttgccgtttccggcggcgtcaatcagcttgatcgcccccttcattgcctcttcgccgaaaatgactttcaggtattcggcctgctgcgcggtgccgagcttgtgctttttaaacgacctgtcgattcttttcaggatgccctcaatcggcagcatgttccctttgccgtccttggtctttacgcccaattctgacagcgcatcagccgcctgcccgacaggcgcctgtaaccgcgtaaacatcgcgctggccgccgtaccggccatagaccccttgatgccgttatcggccaacacgcccagcaaagcggtagtgtcctcgatactggccccggccgcttcggcgatcggcgcgacgtatttcatcgcctcgccaaagtccatcaggttgctgttcgaactggtgaatcctttggtcatcacgtccgcgacgcgctggatctcaccgatcggcatgttaaacgccgactgcatgttggtgatgatgtcggccgcatcggcgatgtccagatctgaggccagcgccagatttaccgttgattctgtcgatttcagaatggcatcgccgttaaaaccggacttggcgagcaccgattgcgtgcgggcgacgtccgtcggcgaaaacgcggtcgtggcgccaatatcccgcgcctgctgacgaatggcggccaactgctggtcgttcttcgccagtcctagcgtggcctgcgtatctgacatctgtttgtcaaattgcacgcccggcatcataaagcggctttctgcatatcctgccgccgtggcaacacccaacccgacggcactctgattacggactgttgcccccaaggccttccccgcctgcgcgcgttgctgaatgcggctcagtgattcctgtttttgactcaggcgctccagctcgccgcgctggcggcccagcgctgtcgtggcttcactggcgctggccttcaatcggcgctgttcggcgctcaggttccgggtagcgatgccgtcagcgttgagcgcgtcacgctgtcgctgcaccgactggcgcaggccgttgtatttcgtttgcagctcggcggcggcgcgctttgatgcctccagcaagcgcgcttgctgcgccgtgggcttttccgtcgccttgaactggacggccagcgcggccgcctcttccttagctttcttcagtgccctgccggtaacagcgagctgtccctgcgccttgcgaaacccgtcaatccgggcgctttgcgcgtccaaaaccttgagggtttgctgcgtggttttgatgtcagcggccagtgatttactggcctgttggatactctttagcgggcgggtggcttggtctacggccttcagcagcacctgtagctgcaggcttttactcatcgtgattaactccgctgcgttgtagtgccttgtggcgccagttcaacagctccgtgagcgtcattccggccatttcagacggcggccagtggaagatcaccgcgatgtccgccatcaggtcatcaacgcccagccgggcgtcgtggattacgccgccgagttcggcgacaaaaaaccgaccactttcccagccagcgccaccaagtccggcagctcaaggcgcgcgcattcttcttttgtcaggttcggcacggtcacacgcggcagcacaaccagcagcgcgtcaacgtcggcgttggcgatcgccgccagcccgacgccgcgcagcgcgcccgcgttcggtttaatcacctgcacatcggtgatggtggtttcaccacgctggatcggggtgtcgagggtaacggtattttcttttgcgtctttcattgtgttctctcaaatcatggggaaaagggccagcccggcgggctggcgcaaaaattacaggccgatcgccttgcgatgctcggccagccggtcaacgccgttgacattttcgaccatgttcacggtatcgacctcgatcagctctttgccgtccacggtcagcttgaagtaagtacactcggtggaaaccttggtttcggtgtcctcgccctgtttgtactcgccaaagtcaatttctttgtggcgaccacgcatcaccacttccacagcggacacctcgccggtgtcgtcacgctggaatgagccggcaaagcgcagcggcacggcatcgacggcgccccactgtttcaacaccagctcatcaatgccgcccatcgaccattcaacggccagcgcgtcatcgtccagccccatatcgatggaggccgcaccgttcatgccaccgccccggtatttctccagcttgcgggtgagcttcggcagcgtcagcgaggacaccacgcccatgtagctgtagccgtcgttgaacaggttcaggtatttcagttttttcggcagtgccatgttctaacgtctcctttagcggttcacggatgccgcaaacgtcgcaagatagcgatcggtgatgcgctggcgcagggttaaatcttccagcggtggcaccggcgtgtagtcgtaatcgataaacagctttcccgccttcagggttgcgacagtgttggcgctttcgtcgtaccaacaagtgccgtcgataatcagccctgcggatttcagctcgcggaatttcgcgttgataccgtcaatcatgtcgcgcaccagcgtaggcgttaccgggcggtcaacagcccataggtgcgcctcggccatggtatcggccagcacctgcgcggtgcgagtgtagttctcgaacaggaacaacggatcatcggaacaggtgcgggaaccccagaatttaaagccgtctttgcggatcaacgtggtgacgcacgcttggtttaacaggtcggcatcggtgccgggcgcctgcaaatcccagaacacgctggcggtgatgccggtcacgccgttaacaccgacgtttgaaagcgtcttatgccagccggtttccgtgtcgattttggcacgcaggcccagcgcgcgggcggtggcataggcgatgtcgctctggttggcggtggtgttccagctgacaaaatccggccagatcagcatcagctcgcgctggctgaaattgtcgcggtacttaatcgcctcttgcacggtcttgcagccgtaggcactgatatagccgaacgcgcgcaactgcaggcaaatcccggccagcgccgtcgcgacctcctgattatccagccccggcacgccgaggatgcgcggcttaacgcccagctcagcctgtgcagataacagcgctttcatgccggtgtaacggccttcagcgttcgcgccgccgatgatgttggaggtggtttccgcagcgtctttgccggtggcaacgcgaacaaccacagtgaccggcttcgcctgttcggcgatcgcccgcagcgacgccgccagcgtgccttttttaccggccttgccggaggcggccagcacatcggtgataagtaccggggtatcgagcgggaaaaccgacgcgtcggcatcctccgccgtgcagaccatgccgacgattgccgtcgatacggtggaaataacgcgggtgccgtcgttgatttcgacgacgcgcacgccgtgatgataatcgcccattaatttgctccgggtggtgagtaggtgcaggcatgatgacgcccggcgcgccgggccgcacgcggtgggtgctggaaggccgaccagacaacaggccgggccggattgggggattttggagggaataacgatcgctcgcgccgatcaataacgctgtattgatctatgcaatcaattggacggattttatccgggcggggtaatgtcgaaaggtagatgcggcaacatcagggaataccgcaaatacaaaagcccgcatcgctgcgggcttttttcttaggcgccgggcgccaccggccagtcaatatccggggctgacatatcaagacgattcagcgtcacacggtattttttccagtccgccaacagcgctttttctgcctcggtcgccatatccaaatcaacagcatcctgaagcggcgcaatagccgcgcccgctatcgccagcaattcattttttctggcttcagccctcgccatcttttcttctgcggaataggcgcgcgggctcaccttcttaccgtcaaagacccactcaccattagccagacagcgctttggcagtttcgttgtgttcagctcaataaccgataagccaatcggccacagcatcgacacatcgctgttaatcgcgcagataatgccgctttcgtcataagccagttttacggtgtccggcgaaaacaatttttgcgcggcgtaccagtcaataccgttatcatcctgaagataaatcacgttctcgccgaggaataattcttccggcgtgtatcgcttcaaattcttaatgtgttgcattttacaccgttccaattgttgcccatgtgccgttaatcagcacctgaaccgctgaataagcgccccagattgaggggttgtagtttgagccggacatacccgtataaacacagcccgacggtaaatcgatgcgcccgccggtatccgcaataaccgtgcgcccggccatgcgcacaccctgaaccaaattctgataggcccagttctgcgcattgttctgcgcagccgagatattttgattaagccagttgctgaggtatccgccccatgctgacccctgtacgtttccgtccggatgccacgttgtcccgctggatgtggtgatcgcaggccatttaccgccgatatgaatacccgactcaaaagcggcggcgccggttctgacatccacagagaacggacgcagggcgttgaatgtgccgtattggtcattttcgtttgtcagcagcagataaagccggttgccgtcattgcgccagaaggaaccgaacccgccgccgaccatgcgataattatcaatatgggtagattggatctccgcgctggcctttagcgttccggttaactgcccgccggtcttcgcaagatagcggccatctgcttcggttttattccaggcattaacgtcaccggccaacaaattgacatcagcggacaacggcttaccgttcaccttgatagagcgcagcgcgtatttctgcgcggcttgcgcgtcggtcagcgcgccaatatcagcagccgttggcttgtagtgtgtcgtgtacacctgcgcccaagctttagccgtcgccggattatcttcccgaggagaacgtagccaaaactccgtattacccgagccgatcgcaaattggacatgccggtatttgttgagtttgaacgtcatcaaattaccgagattccctttagtcagtggatagccgactgatttatcgccgagctgttcaagggtgaaaccgtccggccgtgtgaggtcgctgtcggcgtttgtggcctgcaagctttcgctggggaaaaccactcgcggcaacgcaagcgccccggtcatggtgtcgcccgcccgtttcacatagcgcccgtcggcttcggttttattccatgcgttgacatcaccggccaacagattgacatctccgctcaacggtttgccgttcaccttgatagaacgcagcgcgtatttctgcatagcttgcgcatccgtcaacgcacctgtttcttgcgcggtaggcggtttcgccgtcgtataaatacgtgggtttgccccctgattaggctcagttccccaatgcaactcgttatccatccccaaaccaagacgcatcagtgccttcccggcgacttggaaaccgattgataaattactctgtgctgaagggcggctcatgaccaacggcgtatgctggtttccctcaatattcagtgagtccccatccgtttcagcgttgccgggcttaatagccagttttttaaccgtgccgccggacagcatcagaaaacggccatcggcttcggttttactccatgcaccgacatcggcggccgttggtttgtaatccgtggtgtaaatccgtgaccacaccaccccattttccggccggttagaacggccaataaagccgtgccccaaccccgacacgctgacatagcccgttgagggtgcggcatcgcaaggcaagctcagcaccccggcggcaatatttccagcgatcggcggcttgttctcagaggtcgcattcagccggtaaatttgcgcagtgttgcaataagcgttatcgaaagcccgcgcacccgcgcccagaccaaacgcaccgacctccatcaactgcccgccatccaccccgacgtttttcgtcgcggccgtacctaacgccagattgccacgcgcggcggccttgtctggcaagtcggacagattggcggcctttttcatgctggcatcgctgaccgttttaagcgccttcggcgtgctggctttcgtttcgtcggtactggttgtcgcgctgctcaactgtaccagccctttcgctatggtgctggcatccgggtgattgcgggttttctcatgcgcggcgatcgcctcagccacaaattcttttgtcgccagcacggtgtcatcaccggcgatcacctgaatcgcttcggaactgctgacaatcaaaatcatgcgcagcgtctgcgtgcggccgctgccttctgccagcttcggcttgtagctctccgccatattgctgacggcaatcagcgtcccggcctcgtcatagaggcccatttcacgcagccagaagccgccgacgttcgccggaataatcatttcggccagaatgtgatttttcactgccttatcaatagtcagcccattgagcgccgcacggcatttctcattgacgagcgttgtttgtgccgggttaggtgtcggcagcgtgccgtttccgtcgccgacggccatagagacgattttcaactgcgtgccgcccgcgctggcggcggcaatcttggccgccccggcggtggtaataatcgctttgtatttgctcatggttttctcttatccggggtaaacggtaatgacatcgccatcaatagcggccgcgccggtgtaaatccggccggggatgtcctgcaaaatgttgaggccgatcaggtggcggctcaggggcttggcgtcggcgataaggcgctccatttcctgatacatttcctcggtgatgccggtttcaagtacgccaatatccagccggaacgtgccgggcggatctgcgccgtcggtgtggaaccattcgataacgttgatcaggtagccgagcggctccaccacgcggcgcacggcgccgatggtgcccttgtgccggtgaatgtagaacgcagccgaaaccacgccccgcttcacgtcctccggccacgcctcatcccagcgatcgacagagaacgcccacgccagatagggcagcagatgcaccgggcaggttttcgggttccacaaatcacgcaggggaaccggcacgcgctccagctcggcacacgcggcagcggccgcaacctccagcggtgatgagccgacaggcaataagcggttagtcatcggcgcgccccggtgtgattttcacgccggtgcagtaacccgcctgcgttttatccagcacgatgtcggtggtcggttgagcaacctcaacacgttcaacaccttctacggtcagcgctgcgatgatgccggagcgccggatactgcggcctaagcggcgcatggtcagcacataattttgcaaacgttgtttcgcctccgtgaggatcggcgcaacctccgggccgggatagagaaacagcgtggcatcaatgccatagcgggttattttggccgcttgcacgatgacacgatcggcaaccgggcgcacatcctcatcattcagcgcatcgcggacaacctgcaacaattcagggctggcggtgccgtcgccgtcccgtgacaacacggtgacggtcacgttagccggtgatgggctgattgctgtcacatcagccacccggccatcggccgagcgggcgtgaaaacgataggaaccggccgatcccgctgtgctcatgccttcgaaagcatcctgcaggcgcaggcggtaatcttcatccgcttccatgattgccggtgtcggcggaatggtgctctcatccgccgggacgatcaccagtcgcggcgtgttgaagttttcgccgagctggtcgaggtcttcgccggtggaatatgccagcatcaccgctttggcggcatcattgacgcgctggcgtaaaatcacctcgcggtaggcgttctcctgcagcaacttaacgatcggctccgactccagcgccagcgtgcgcgcgacggcctcccgctgttcctccgggtaaagcgaaatcagcgtcgccttacgctctgccaaaatgtcttcataatccagcacctcaacgacgatcggcgcgggcagttggcttaaatcgatagttgccatggtttcagctcacaggaacagacagcgacagcgcgccgggggcatcggtgcgggtgccggtgatgtcgatcaccatcttgccgtcataggtggtattaaaagcaatgccggtcagcttgacgcgcggctcccacgccaaaatcgcgctatagcaggcggccataatctgcaggcgcagcgcgtcgttctgcggctggtcgagcagctcagagagcaacgagccataatcacggcgcatcgggcgcgaaccctgcggcgtgatcaagatgtccgccacggactggcgaatatgctcgatgtccgtcagcgtgcggccggtgcatcggttcatgccgatatatttggcgctgttcatgacagcagcagcccgataaacaggaaccagccccagccggacactccattaagagccagcatgacagcacccgataaggcaatcgcagcacccaatcgagaaacaagagcggccaaaattactgatagggttttcatacaggtgtcctcatgagggttcatcggttctcccgccgccgatctggacgccgccgtgggtgtgcgtatcaacaacaactccgttggatgagaacgagccgccgctatgctcaatgttcccgcgcatcgccccgcctttttgcacgtccagcgtgccggtggtgagcttgttggtgcagaccacctccggcgcatcgagcgtgattttgtcagccttaacgatcaccactttggtgctggcggtgatggactccgacgcctgcacgtcagcggttttaatgccggacacgctcagcgcgccggtttccggttcatactcgatgaccgcgccatccggaaacgcgatatgcagcgcatccgccgacgcagacggggccgggaagtcgtcagagaaaatgccgcacagtacaaacgcggtatcgagttcgccacccagcgcaaagatcagcacctgctcaccgaccgagggcgccgaccagctgcgagtacgcccggcgcgacaggttagccagttgagccagtcggtaagattgccgccggtttcgacgcggcacaggccgttatcaaggtcaacggtgctcacggtgccgatgcggatcaggttgcgcagcaggcgcaaaatgtcgtgttgattgttcatgctggaaggatgccgcccggcgcgggcggcgacaacgcgatgaggttggaagatcggaggcacaacagggggttattctgtgaggtgttctatcacggccgtttctatgattttgacgtcatccgggccaaatcccagtaacggacgggcctcatattttaccgcctcgctgtgcggcgtcggccgatcgcgcaggccgtaatggtgaacgtttaccatgcgtttcacacgcccgacaaactcaaccacggccgcatcgctgttgccctgggctttcagatagcgggccgtgcgcagcttggagaacatcgcccgatcgcgcagacgctttttgctgcgaagccgcgttttgcgcggcgcgtaaggtgtaccgtccggcgcctgctggcgtttgatgtgttgctgttgaccggcgcgcagtcgctttgacacggcaacggccagcgacttacgcgactgcggcgacagcttggcaatcagcccggccagccgggtgtcaaaggggttaagctcgctcatgccattcactcactaattcgccgtgaacaaagagctgcatcggccgcgtcacgtcctccggtaacggcggctccggcaggtgctcaacatgcaacgcgccatcgccttgctcgagcaccaaaacacgttcggtcagctgcagcgacacgctgaaatcgtaagagccgttgttgttaaagtcgctcgcaaaggtgatcccggtgcggcgcttttcctccgttgccatgatgtccggctggttttcccgtagccatgcctgaaccggcaccatgattaaatccagatcgccggtatagtccaaaaacagcaggttcagcgtatagcggtactcatgggacagcgagacggcaagcgtggcggccacattgccgcgctctacccgaacttgcaggttttcagggttgcgctgtagccacggcaggcagcgtgtcagctcagcgcggagctgttgcggttttaacatcgtgttgttcctgacagtgttttatcgtttcgacctgcaccgcgcaggccgccaaggcgttttcaagctggcgaatatcggcgctcagatcgccgttagtcgccgggcggctggccgggatttggcacggactcactttcggacagccaacgtagataatccgcggcgccggtgaagccggggcgctggtgcagccgggcaacgtcagcaggcaaagcagtgttaaaccaatcgcgtaattgctgattttcattgagtagcctctgtattttctgctcgcgcgtcagtgccagccggtgcgcggcgtttaggtcgccccttaacttttcctcttcctgcgccagcacacctgccgccgcctgcagcgtgtcgatcgccgcgcgggtatcggtcagcgccgccgcaatccggccgttctcctgccgggcgctttccagccgttcccccaacgtgacaacctgccatttcatccaaccggcgacgaccagcgccagcaccagaaaccagccgatcgcgcggctcatggcgcggccccgatcaggcagtgggccagctccgccgcccggcgccgttccagccccggcgatttgacgccgttgacgaacacccagcgcggcaactgctggcacgcgttgcgccagtcctgccgcttgatgaaaccggccagcgtagagccgcaagcggccgtgacgccgacgttaaaggcaaaggacaccaccgcgtcataaaccggcggcggcatcgtgacaggcatacagcggcctatgccgcgctccacgcgatacacgtcggcgacgaggttaacggcagcttggcgctcgctgataaccgcgccgggctttaccccggccgtgtggccgatgccgcttgtccagacgcccgcctgacactggtaaggggataaacgacagccctcgaaatcggccagcagtcgcaacccggcctcagagatctgcagtgcgctgaattgcggcagcagcaccgccagcgccagcacggcggccacgctgcagcgtttagcgattgagttcatcgtaaaccctccggctaacgcctagcttgttcaacagctggtagcttttgcggcggtagtaccagttaacgaggaacgtcccaacgccaacggcggcgccgaccataaaggcgatgtcctgcggactgtatcggccaatccaagcgagaaaggccgctacggtataggccacccacgacgtaattttctccattgctaatcccataaattgacggtttcacgctgcggcgcggcggtcacgtccggcagctctaccgggtggccgtggggcaatattgccccagcagcggccagcccttcatttagcgaataaacctgctcaaccacgccctgcgtgcgcccgtagtagcgccagcaaatcgcgtcaacggtgtcgccctgcagagcgtagactctcatcagagcagtccgatgatgcagtggctacgctcggccacgttactgatcgcgttgcgggcgttgcgccacaactcaccgatcgaggcttcaaccacatcagccttgcggccgccggtggcggtggtgtcgaaactgcggtattgctccgagagcgtcgccatggtcattgcgctgaccgcgttgcggtattcgctcacccgcacgctttcgccgtcgagctgttcgcccggcacatcctcaagccgctgatagccgtcggccatctggtcgcggcggaaaatgaacaattcggcgttcacctccgcgatcgcgcttttaattgccagccgcaggcgcggggcggtgattgtgccttcaatgcgcatcacgtcgcgcacgtccgccgggtcaatgtccggccagaaaaagacgtttttaacgatcggctcatcctccgggcgcggtgctggcgcgtccgggcgtggccgttggatcacaacggtgctcatatgacctcagaaagttagggggcggtggacgacggcgttaacgaggtgaaacctgtcgcggccgtcgtgccgcccggcgcggggcgcgttctgtcagcggctggcgacggtgcgtatcgcccgctccagccgttcaatgtcctttttcacgccgcagccgttatgcaactgcagcgcacgcttaaggtggttcaatgccagttcagccctgcccgccgcgcgcaagacgtacccggtgattttgtgcaacttggcgcgcacttggtcgggcatgtcttctgcgtcggtgagttccatcgtctgcgtgaggtggtcaatgttgaccggctccccggcctcaaaggcgcgggtggcagactcggcgacgtcttctgcgatgaggtatggcgtggagcgcgcgaaattgcccggcggcgccaactggtagcgcagcgcatagcgggcgatgtccagcgcaccgggaatgtccccggcatccagacgccagatcatgaccgtcatcagaatggcgtcctgcgcgccgcgaccttcggccagcacaccggcaacccagggggcatagtccggcagcagttggcgcttgagttcggccttacgctcttgtgagcgcacctgtttgagctttcgcttatcttcattgagtttaagcatcatccgttcatagccgttggcgtggcgcagcgggtcattctcccgctgcgcggcctcgaccgctgactggcgcataaggtgacggcgggcagggctggtcatggttatttaccgcctttcgctttgtcgtctgccggtgcttcctccggctctttcacttcggcgactggctccgctggggcggtggcaaccttcaccgcttcaacaatggcaccggccagcgccttaatgtcatcgccggaggtcggcagtgcggccttggtttttggctcggtcggcttgacggtcaacagctcgatgttctccaccagacagccgcaggcgtaatcctccactacatagtcctcgttgatggactcatagttttcgatgcggtcacgcttcgagttttccaccatatggcggcggtgtgtgtcttcctgccagtagatcgacaggttatccatgcgcgtaatcagcagcgcatccgccgggaagtacggcacgcgcacagcgggcaggttgccgatgcgcttctggctgataatcagatcggcggccatcgcttcagtgttgggctgttcctgattgacgagcgggaaatacttgtccgccagcagctggcgcccgcagatcaccaccagttcagggtcttcctgataccacggcgcaatcagggtgttggtggcatccatcaccagtgcgtcgaggttgccgtaatcgccaccgacacccacgcgaactttttcagactccacattgccatcgatacccacgattttatccagcacacggcccggcgcgttctcgcggtacttctgcaaccagcccggcgcaatgtcctgcagcagcgggaatttaacgcggttggaggttttggcgcggtgcgtaccgttaaagccgatcatgatgcggtcgagcgcctgacgtttcacaatcgcatcgcgtaaacgggtctggaagtcctgataacgcgcccacaggtcgagagtgttgtaacggatatggaaatcgtagttcacctgttggcagaaatagccttctgcatccagcgtggcaaagtcggccgtttcgcgctcatcgccgccggcggtgtcggtggtgctggcaatcgtgccgctgacatccagcccgattttttcgcctttcatttccggcaccggcacgatgttgatgcgggtcaggaacgtggaggaatcctgtacgcgggtcataatggtctgcgtaacggacggctcgacgctgaattttttatccagatcgccggtagcgacgccgttcagttcggcgaggcgggacagaaacgcattaaatttaaaacgagtttgcttgcgcatttttcttcctgtttttgttcggttttatcgggtgtgactgtcttagcagtcggtcagcacgtcttgcgcactgttgccgccggtggcgtccgggcgggcccgctggctgaaatcttccgaggcggaaagctgggcttgcagcgcgctgaacgcatcactgccggtttttacctgttgcttgaggtcggcaacctgctcgctcagtgcagcgaatgtctcggtaaagcgggcgtccgcttcctgcaactgctcggccacagtcatcaccgcgccttccatctcgccaaagcgcacatcatcggtggcctgcttgcgactaaacatcgatttgatgcgggcagagaatgaggtttccgggtcagcgaccggctcaaaatcgaaacagacttccagcggcgcggagaattcgacgctctcgtggcggcggctgaactccagcatgtcagtgccgaggctcgccgggtcatcggtgacggccaacccgaccagatacgacttgccggtcttggcgaaatcgcggcggatctccatcgaggtgaaaaccttttggcccgcgccgaccatcgacaccagatcggctgtcggggccagactggcgtacaacgcccacttgccgtgcaacagcggttcgtccggctcgtcgattttctcggccttcagctcaaccacgccgccgtaacgacggaaatagccatccggcaaaatccccttgatgtgctccatgttgatgcgggcgccgtacaccttcgggctgtaggtcgcggccatctgctgaatatccgcagcgccgatctcgcggccgtcaacggtgtcgccttcaacgccgatgcggaaaaacttagtaactttctttgccatgtaaacggctccggttgtggtgattgggttcggggctagtttcgggggaatggcgccgcgtctcaacgcgttgcggttggaagatctgaggcacaacaagggcttaatgcgagtcgcccggcgctttcgtagccttggctgcatgaatacgacaccggcaacaaccattatcagcgatccgcgccgccaagctgccttgctctactggcagggcttctctgtgcgccaaattgcggaaacgctgaacctcaaggggccgaccgtgcagagctggaaactgcgcgataaatgggacgatatcgcgcccatttcccgcgtggagcaaagcatggaagcgcggttgattcagctcatcatgaaagacgtcaaggaggggaaagacttcaaagaaatcgacctgttaggccgccagattgaacggctggcgcgggtcaatcgctattcagcgaccggcaacgaagcggacttaaacccgaacgtcgccaaccgcaacaaaggcgagcgcaagcccgccgagcgcaacgtgttcagcgaggccgccgtagagaagctgcaaagcatcttcacggaaaccaccttcgaatatcaaatggggtggtatcgcgccgggctgcaacaccgtatccgcaacatcctgaaatcgcgccagatcggcgccacgttcttctttgcccgcgaggcgttgctcgatgcgctgaccaccggccgcaatcagattttcttgtcggccagtaaggcgcaggcgcatgtattccgcaattacatcattgattttgcccggctggtcgaggttgacctgaaaggcgatccgatggtgctgccgaacggcgcccgcctgatgttcctcggcaccaacgtgcgcaccgcgcagagctacaccggcaatctgtatctggatgagtatttctggataccgaagtttcaggagctgcgcaaagtcgccagcgggatgtcgctgcacaagcggtggcgcactacctacttttccacgccgtcgagtctggcgcactccgcttatccgttctggtcgggggaactgttcaacaaaggccgccgcagtaaagccgatcacgttcagctcgacctcagccacagccacctgtcaaaaggcgtgctgtgcggtgatgggcaatggcgccagattgtcacggttgaggatgcgctgaccggcggctgtaacctgtttgacctcgatcagctgtcgctcgaatacagcccggcagagtatcagaacctgctgatgtgtgaatttgttgacgataccgcgtcggtattcccgttcgccgagctacaaggctgcatggtcgatacgctggaagagtgggaggacttcaacccatacgccgtgcggccgttcggttatcgcccggtgtggatcggttacgacccatcggaagccaacggcggcgatagcgccgggtgcgcggtgatcgcgccgccaatggtggccgggggcaagttccgcgtgctcgagcgccaccagtggcagggcatgaactttgccgcgcaggcccagaagattaaagaccttaccgaaaaatattgcgtggagtacatcggcatcgacgcgaccaccgtcggccaaggtgttttccaactggtgcgcgagttcttcccggccgcgcgagaaatcaaatacacgccggaaatcaaaaccgccatggtgctgaaagcaaaagacaccatcgcgcgcggctgtctggaatacgacaccagccacaccgacatcaccgccgcctttatggcgatccgcaaaaccatgaccgccagcggcgcgcgctcaacctacaccaccagccgcagcgaagaagccagccacgccgatgttgcatggtcaatcatgcacgccctcttaaacgaaccgctcaccgcaggcagcggccacagcagcccgaatattttggagttttactgatgagcaaacgcaaaggccgcaaggcatttaccacaccggcgccagccccaacagcagagcagaagcaggattttgaggcttttacctttggcgagccgtccgctgtgctggataagcgggaaattctggattacatcgaatgcacaaccaatgggaagtggtacgagccgccaatctcattcgatgggctggcgcgcagcgtgcgcgccgccgtgcatcacagctcgccgatgtacgttaagcgcaacattttggcatcaacgtttattccgcaccggctgttaagtcagcaggagtttagccgctatgcactggattatctggtgttcggcaacgcctatttagaagaacgtcaaaaccggctcggcgcgccgctgcagctgaaatcctccccggccaagtacacacgccgcggcgtggatcgcggcgcttactggttcgtgcaggactggaaagaggcgcaccgcttcaagaccgacagcgtttttcacctgattgagccggacatcaatcaggaactttacggcctgccggagtacctcagcgcgcttaactccgcctggctgaacgaggcggcgacgctgttccgccgtaagtattaccagaacggggcgcacgccggttacatcctgtatatgaccgacgccgcgcaaagtacaagcgacgttgacagaatgcgccaagccatgcgtgatacaaagggcttaggaaacttccgcaatctgttcatgtacgccccgaacggcaagccggacggcattaagattttgccgctatccgaggtcgccaccaaggatgactttttcaacatcaagaatgccagccgcgacgatttgctaagtgcgcaccgcgtaccgccgcagatgatggggattatcccgaacaataccggcggcttcggggacgtgaaaaaagccgctcaggtgtttgtacgcaacgagctaacaccgctgcaagagcgcatgaaggaggtgaacgactggatcggggaagaggtgattagattcgcgccgtatgagttgccgaccgaataagcagaaagccgccagtgattggcggcttttttgttggcgctggatcaggaatgcttttcgataaccagatcaacaccttcattcagcagttcattaatcgactgcccggtggccagtgcggcaatggctaacgcctgatggcgttccggcgacaggcgggtggttactttgccgctgtacgacttgtaaggctcgatgccgtctttatggcattcatcgagaaagaccgcgagtgagatcgcgccttctttcttcagctcgtccacgctgtaggcgtagaagtcggcgccgccattcagcccgacaaactctccccggaacatttcaatttcagggtcgaagttgatgacggccgtatggccgtcaattttcagtgtgttattcatcatggttttattcctaagctatccaaccagatccgaatggagttaaccgcccccttgtcagtggtaggtctggggtgtggccggtgaaagactcttttttcacctttcaacagcaccgcgatcctagaaccttccctttcgtgaatctccgcccctaatgcggtaaaaagcgcctcaatatcagaccactttatagaaccgttgacaggccgggcaaacacatctgacagcgttttttggtgtcgtttgttcatggggtttatagtatcactttatgacaccattgcaagggtattatggtgtcattttttggtgtcactgaatggcgatgttatgcagtgcgctgtaagcgcctgagagcgccatcatggcgccacaacatcaaaccccattctcatacaagtattgcgataaatcgccgtgacgggacgctggcggctcttttgggaggggttcaacacggcttgcgcgcaatgctatccccgcctcgcctgcgcgctttatatgtcgcttttaatgcagttgcatgatccgtcgcgatccgcgccagtgctggtattgcagggataaaaatcgtaccggatcatcatgcgatttcatgcagccaacgcaaatttaaaaagataagccccttccacaatgagatctacacatgcaatgacgaagcctttcatttcactattaataaggaaattaaaaatctagataatcattttaaaaactagcaccatcatcttttcttgcctttattaatattgatttgttcctttaactccattaacgtttctatcaactcatgcaccttggtgctaggattgtcagtaccactactttcggccgctcgtaaactttgtttagccttagtgataacctcattcaaatcctttgttttcaatgagttaaatgttttgtagaaaatacctttagctgctttatcatatcctttaatatattttttcaactcagagacgacttgatccccagcacttttcccaggcaaccctctatattcctttgttgaataagtataatgaaggagtaaccaaaactcgaaacaaggaacggaattcactgtaaaccataccttattaggtttagctcttttaatagcatccaatgctcttaaataatcaacatgagcatctttatcaattacaatataaattttgtcatagggcgcaccttgggcagccatatcttcttgttttttctttgcatgtttcacaacacacatagggctggatccagattccccagtaacatcaattacacttgcagttaataatccaaaatgagaaatcaaatcctcgaaataagtcggctcagttttctcaccttcacaagcaataagaatcttcattaatggtgcttttgtggcctctttcctcgctaaatctttagatgtttttgggccacgtctttttttaaataaatcctcactccccatcttcgcccccaatccattttctaatattaggaagggcaccgtatcgaccatctaaatatgccgcctccaagttctctctcccttttctagggctataatcagtcaatgggtaaatgttagtttcgcttttatcatttttctcacaaaaccaaacttgatctcttctgaaaacactctgatttagaatagatgtttcatgagttgagaaaattagttgagccccttttttatttgtcattggatcattaaatagcttaactaggaaaccaactagcttaggatggagtgtatcatgcagttcatcaatcagaagaacatacccattatccagagcatccaaccaagggccagctaatgagaaaaacttctgtgtgccgtgtgactcctcctctaatgagaaagttacggactctcctttatcatcatagtgaacagtatagatatcaagaacctccttatctttcatatttgaaatgacaattttcttgatatcttctggcatttcttctggcaaggtttccggattaaacttctcttttttcactaagatgtcatcaatccctacatctgcagctttcaaaaaaccaagaatatctttcttagtattttcagtgcaccgcttagctgagaatgaattattccaaccagatacacctgacattctaagtgttttttggaaccacataaacactggtttcagttgttcactgtttaattgaaccgctgtcgacaagaacaaagcattcgcccttgtagaacgctgccagacttgtttttcgcccagtaaataattaccgaaatcccaatcatattctaatgattcagcattccaagaacgataataccatttttgaggtcggcctttagggtatgcatagagccattcatcaatgatacgatcctgcgtagcagaaaatccgaattgatatcgaaccccttctgcaataaaaataacttcgaattctgttggttgcccgactgactcagaactcaacttaaatggatatacagcaatattctcaccagcttgattgttggcagctgattgagtgacaagatccatcattgctcgtacagcaagcagtaggttagattttcccgccgcattcgcgccataaataactgctgattttaaaacgtttaagtttacactcccttcaaccttaaagacattactatctaactcattgcttttattagcaataagagaaagtgtttgtctgtttttgattgagagatagttctcaacattgaattcaattaacattttttgctcctttagctcggtgctgtgaactctgtaagagcagctcacacaaccgccaaaaccaactttaaatggactttatgacaaaaaaagccaaaaatacagcaataatttattatcaagtccttttttgaaaaaaatcatcatttacttaagtttttttgttgttgcatcacttgcacacgctgcaataatttgagtaaccaattgattttattataataataaaaggccatcttctgaaccacctacgctagtgtcctggcctgatatccgagagtgttaccataagcgatagttgaacgaaattggcaaccagagatgcaaaatttctcagcatcattgcagttcagtaccactagtgcgacgaatgttcgaagtaacttagcttttatctaaagggctatctaagagatcgtagaaagctgcctgatcacttctgctttttcaggggcaatgctggttttcatctcccccgccagttctgaaatccatatcagtgcaatgtctttgtctttcgcttggctctcataacaaatccccagacgggcgatgagttcaattctttctaaaacaaccacttcatccactgcttgcaccctttccctccgatgcttaattactgtatacatatacagtatatgcctatcggatttaattgcgcaagaaattattggaagcccgcccaatcgctaaccgccggatagtgcattgaaatatcaccaaatttgactttagcgccgcgcgccaatgcctcaagttcccagcgcgtcggctcaatgccgtgtagtgccagctctgagtaaattttggatacgcgatcgcgctcggcagtggtcaatctggccgatgcagcaggctctatacgcttatatgggtctattcctctttgctgcctgtttatctgcggggcatttgcccgtaaacgcgtcataacagaccgtgcaacggtcatgtcatcccagtcaatcagggtttccggtgcatgttccatcaccgccacggcctctacaggccccccatcctgcgcattttcggcgccaccgctgccgaccaacccacagttattgacaggactccgaggcgcgccggaggcgcttttcaaagtcaaaggctcaacggcaacggctttagcgacaatgcgccattgcgtggtgcgggtttcataaacacgatcggcgccgatgtgcggggcaaaaatccccgcgattttctgcacttcttcgtcataggcgttgcgctcgtcggcaacccggcgggctacacgcacagtctgatcgtcacgggcaacgttagggccgccctgggccagaatgtaagcggcaaagtcaccggcatcagcagcagcgcgcaccgcctcaacggtttcgtcaaactcatcggccagactgacagagcggatcttgcggcactcacgccatgcgccgcgcgacggcaggccgataaagtggaattgagggatacgccacgttgaagcccacgcggtgacggcggccgccgtatcagtcaacagctcgccggtttcatgatcgcgctcgccgtccagcgcgtagccgtcgatattttttgcaatgtatttggcgatatagcccgccgcaccgcctttgttcaggtgcttgcagtcaaaccggtttttagcggcgccgcgctcatccccatcttcagccatggcataacggcgcatgatgtcgatcacctgctggcgctgctctttggaggtaaacagcatcatatgccagtgcggcgtcgcatcatggtgcggttcgacaacgcgcacgccgtagacctgcaggcccgcatctttaaacgctgtgcggatcttgctaaacagcttcacaagatagcgctggccgtcttttggcgtgtacgcctcttcatcccatttgtgattaaaatgcaccttcgggctgttcttgccgacggcgcgcgtcgggtgatatttggatggggtggtgatggtgataaacatccctttatcgccacggatagcggcggcctgctcaacaccggcgatcatcgccattaactccatacgacggatttctgggttagagatgcttgccatcaccttgtctatgaggctgaagcgttcgccggtctcgacgttctcaagctcgcggctgttcagataatcaaaattggactggcggcgcgctttcacatcccgaatagcctgcttactggcatacgacgacgccccgcgattcacattacccagggcgatcagcaacgcctcgcgccagcgcgtgcgctgggacttaaactggcgttcccaccactcggaatcaaccaaccgtgacaggctggcaatcgctgaccgggcatcaagtttgcccttgcggtatttgcgccagtgcatcggtatgatgttgaaggcgcgcgccatacctgcaatgcggccataaaattctgattgggtggcatcttcgaacagcccggcattgtcgccgccgttctccgccacaaattcatcgcagtaatcttcgtaattctgcagaagttgaccggccacccgatcggcgaggcggcgtaactctttgtcatccatgccgggcagtgaggcgtaattatcaacttcagcagaaaaccgcattgacgcggcgagattcatcgcatttttggcgctcaccgtttgcaggcgcggccagatgcggcgatcgaactggaataccagccatttgttagcgtcgtgcagccctttgctcttgagcaaattggtgtaacgcgtcaggaacatggcgctgaggaagcgcggcaggcggcggatattggttaaaacagcttgcccctgagcgagttcctcacgggtaagcggtcttaccggcccggcaactgccgggcgcggttcgttccatgggtaagcgtaggcgggtgccgcttggctcattgcactttcgcgccgttggcgtaggcgcagttgccacagtaacgctcattgcaagcagaacacagctcaacatcgaagccaacggtgcgaatagcgtttttcacgtcttctttatccagccatgttccgtctgggtctggtgacatccacggatcaggagaatacggcagcggcaaccgcaccggcgtagccagccgcttttccagctcggcgatgcgctgagttagggcggagacgtactcttgcgagtagacgggttcttcattaaacgcggcacaaggtttgatatagccgcaatcgccgtaagaaagctctttcctgtcccgctctcccacataccctaccggcttgctcagttcgctcagcttattgtccatttgcagcctcacacaccgcaaaagcctcttggcacaggttgccaatgcggcctatttcggcacccaatgatgcaatgctattaacactggaattacggacgctgtgatgaataaggccgttcacaagctggttaatcgtagggtaatagccgatagcctcgtaacgctcttgaccttcgctttttcctgttttccctaccttcaccgtattaagaatgaattgcaggttatcgctggtgataacaaactcagaaccgattttaatttccatgttatttccttaatcgtaattttgattttctggtctgcgtgcaaattctgaatcgctcaaatcagccgcaataaaatgacctgccagcaacgccagcaggccgagcaaaatagagaactccgtcatgccttccccgcgtaaaggtgactttgcgtctcgcggatctgctgacagcttacgcaggtatcaacgccgggaacggcagcgcgacgcgcggcaggaatcggagcatcacattcttcgcaaacgaaagcagaaggcagcgcagaggatttacgggcattgataatctgcgcctccaataccagcgcttgccgctcctgttcgtagtccatcaagtcggccattagtgcagctcctgcgcttgatgctcgatggcttcagcctcttggcgcaacagctccacagcctcgaccgctgttaacccatcttgggtgatgtgggccgccagccgaaccaaacgcgcagcagctacctgagattggtttttacgttcatcaacacgcgcgctatctaacaaatcttgaaactcatttgttaaggcagaaaccgcgcggcaggtaccagcgacaacaccacgctgaaaggcattatttgccgagctggttaaagttggagtaagaagcaaagattctttcatcgtaaattccttatttcagacaaagcgatgcccggcgggttaacgccagaattacgcaatgcggttaattaacgtttaattcgcaatcatcatcactgataaatcgcggtaaggtttttgataaatcaatcaggtcattcagcgcccacacgatttgtttacgctctgaataactcatttctgcaaacttcatttttatatgccgctctttcagcccggcatgaaaacaaacagttctgcggatatgttccggcgacttatcaaaagcctcttgcgcctgattccgcttatgcgggaacagctcacgcttaatctgtgaaatgcgcttaataccgatcgctttttgtgtttcagtagccaacaacatgacagccccaattaacggcagaataaacggcgcagcggtgaaactggcttagccgttgacaggccacgcagcaaggcagcctgatcgtgacttgggcgccagcgcttgccgcccggcagttcaataaaaccgtgttcaaaatgccgtgatgggctttgttgtttcagcagcggagcgatagaaataaccacggtgatcacctcagcttaaaccagcaacagcgctcagcccgctgatcacgtcaacggtggaggccagagccggggtggattggatgcggttctgaacggtcaagccgatcagcgacaaatggcggatcgcggtgttgacgctttcaagcagtgcgcttttacgtaccggcgttttgtggtcgccctgaacggcggcggcggcaacgttgccaactgcggccgtagcctgcagtgcatacgttggaatattcccggcgcaagcctcattaacaggcacagacggcatgcagttgatttgtgccagtaaggcatcaatcaggctggaatcctctgtagcgtcagtgatcgccagcagttcggcacacgtgagctgatgcggctggcccggactcaatttgttgcgcagcgtctgggcgttcatgccgagctgtttcgccagcgccgtcacattgtggcgtgctggaaactgtcggcaggcttcatcgaagtgcggatgtttagaaacagcgtaatcaaacatagttcactcaaagttaatctgacaggataactacacgtttagtgaaatgttgcattcagacagcgcttgaaccgtcaatgcaaccatgttgatctcaactgctccagatttggtctgcttaggtttaatgggtaagcgcccatcttcaaccatatggcgtgctgtaccgatcggcgtgccagtaatacggcaatattcagctaaaggcaggtaaggggtaggaatcgcaattgtaatgttagggcgcatgaggcaagatccgaagttaatcaatagtgctcaatagtcatcaatgttgcttcaatcaacattggcaatgctacgacagcttaaagcgacattgcaaggataaattaacgtgaagttacatatagaatttgatcaaggcggcaaagcagtcatagagcggattgttgaagcatacggattcagcacccgtgtagctttggctgaacatctcggcataagtagtagcagcatgtctatgcgctacaaacgagacttcttcccggccgacatagcgatccgctgcatggccgaaacaggtgttaagctcgagtggttagcgaccggtaaaggcaaaatgtatgacgatggacgattagatgtgttggagttgcccagcaaaaagttggtagacggtgaggtcttcgaagcttctaatttagtgcttgataaaaatttcttcccagccagccagcaacctcctatcaagccagtaatggtctataacgcctcaaaccaatatgtcattgagaccgaatttaaagagatttatgacggtaaatggctagtgaacattgaaggaaaaacgagtattcgcgatctgacacgcatccccgttaataaagtgcgtgttaccggtgctggcgtgcctttcgattgtggtattgatgagatcggcgttttaggcagagtaataagtaaaatagagtattactaaacacatgggcatcaagaagctaaatgacggccaatggcagcttgacctttacccgctagggcgtgctgcgggtaaacgtataagaaagaaatttgcaacaaagggtgaggcgatggcttttgagcgctacgctttagatcctgcgacaagcaagccatggctgggagaggcaactgataagcggacgctgaaagagctgattgatacctggtattcattacatggaatcagtctagatgatggcgaaaaaaggcaaaccactatgcatcatgcctttgagtgcatggggcggccattagctacggagtttaatgctctgttgttcactaaatacagaaaagccagacttgaaggtaaatttcctagaactagtcgcgtgcagaaagtttctcatcgcacaatgaatttggagtttgcctattttcgagcgatgttcaacgaattaaaacgcctcggacattggaaaggtgaaaaccctatcgagaatgtcacagagtttaaaattgatgagtcagaaatggcattcctttctgaagatgagattaaacgcttaatggcagagtgcaaaaatagctcatccgccgatttatctattgtggttgagattgctctttgcactggcgcccgctggtctgaagcggaggaactacgcggaacacaattgaccaaacataggatcacgtttactaaaacaaaatcagggaagaacagaacagttccgatcagcgaatcactatatgaaagaatccctaagaagaatggagcactgttcaactcttgctattcagcattccgttcagctatcgcgcgaacaggcgtagagcttcctgatgggcaactgacacacgttttacggcatacattcgcctcacattttatgatgaatgggggaaatatattagtgttgcaaaaaatactcggtcacagcgatataaagacaacaatgcgttacgcacacttttccccagaccaccttagtgatgctgttaaactaaaccctatatcgagaatgaaaagatgaaaaaaagatcaaaaattattataggaattttattgtcaattattgccatactcccaattttatcttatggtttgaagtttgggtttaacataaaaaacatatctggacaaaatgcaaattgggccgcttttggttcatttataggaggcatctatagttctattttctcttttgcaagtgttttcattctttctataaccttatatcaaactagagaaaacaataaagagcagatccgattaataaagcaagaaagcactattaaagactttaacttactagttgagcaattactaaatcatttttcatcacaaaaaaaatacacaccaagaataagagacgaagaaaactttcttcacagacttgatgaagatctaagaactaatcttaagctttccccaacattaagctttgaagatcttgtagagcaacatattagactgcacacctatgacttatacaatgaggaagctaacataatgataaacctagcttacatatttgatatgattccagatgatttgcgcagtgtatataaaacagtttttaactcaaaaattagtaacgacaggcgattcttgttaaaaacctatatgaaaattttcaaatttaatataactaacaccttcatagataagagtgacttctgcgaaatccctcaaaacctgatagagctgaaaaatcagtgtgaccgccctttctagaatgcctcaaaactgcctcagtagaccgggaaccctgagtaaacttgattagcattgagcacacaacgtattgttttttatggcaacctattgttttatataactctatcaagggtctcataatcgcttggtcgttggttcaaacccaacaggggccaccaaattatcaaggggttacgttaacagcgtagccccttagttttttctgcggcgcaaccaggcattcgcctcttttgcaacagaacgcaaatttcattcgcccccctgccgcctctagcgtgaattaacatcctcaccggcctcgctattttgcgcgtcgaatgcggttctcgccgcatcaatatcggcaatatgctcattcgcccaggttcccagcgcgatgacgggtacggtcaatgagcaaccgagcggcgtcaattcatattcgacgtgcggcggcatgacggcaataactgtccgcttgactaacccatctcgttccatattgcgcaggcacagcgtcagcatccgctgagatattccattgattgtacgctttatttcagtgaatcggcgtggcccgttcgccaagagcataatgatcaggacactccacttctcaccaacgcgcgccaatacctggctgatcttttggcagtcggcatgtcttaaatctcgaggttgattagtcacattcatgataccgggttctcctaatgtgccttattgtctgccattttaggacatggttatattgttatccctggttaccattttatacctaaggatttcatcatgacactgcttcatatcgattccagcattctcaacgaacaatcggttagccgccagctcacggcggcgatcgccaaacagctgtctgcagctaagccagacgccaggatcatccacaccgatctcgccgccgacccgattaaccacctttccagcgccgaatttctggctctgcagggcgtggaaccgcaagacgagcacgtcaaacaggccgttgcccgcaacgccaaactcgtcgacgacttccttgccgccgatgtcattatcgtcggtgcgcctatgtataactttacgttgccgactcagctgcgcgcctggcttgaccgacttgcagtgccaggcagaactttccgctatacggaaaacggcgctgagggcctcgccaaggggaaacgcgttatcgttgcttccacccgcggtggcctgtacggcgaaggcacgccactggccttcctggaccatcaggaaacctatctgcgcagtttcttcggcttccttggtattacggacatcaccttcattcgagcagagggactggcactcagcccggaaaaccgcactgtcgccatcgatgcagctgcggctcagattgacggcctgaccgcttaatcggggccggttcagaacagcaagagcaggctcgcggccagtcccttttttgggctggccaccggcgatgcaataccgctcaattctatggctgtgccgcgtaccccggaattcgttcgcgccggatttgtaaactggagattcaatcatgaacaccacgttgacctcaccactcgcgcccaacccgcggcgtattacacaacgcacccgaggccacggccacggcccgatcacccggctgatgagcccttccgacctgggccaggtgattaaacctttcgtattcctcgatctgttcgaggcggatcagcgcaccatggcaatgctggccaacatgccgctgcatccgcattcaggcatagccaccgtgaccgtgccgctcgaaggcgcttttcactacgaagatcccgccagcggcgctgtcgggacgctcggctatggcgcagtggagtgggcgcgtgccggcggtgggatgtggcacggcaaggaattgtccgccacggatacgccgcgcatccagggattccagctctggctggccctgcccgccgagctggagaacggtgaacaggaaagccgttatatcgaagcccggaacatgcgccaaatcgggccggcgcatgtcatcattggcaaccatgaaggcgtgcaaagcccggtgcccgcgcaggaaggcatcaattacttgctcgtcacactcaaacccggcgaaagctggacttacctcccgccagccaagcattcggtcggctggctcgcgctggccaaaggccggctcagcgcagacgcgcctatcaacgcgggcgagatggtggtattcgaaccgggggaaatgtccattgtgcttgaagcatccggcaatgaagatgccgtattcgttctcggctcagccgtgcctcacccgtatccgctgcacctcggcgcctattcggtacatacctcagcatccgcgctggaagccggcgaacgtcgcatcgccgaactggggcgcagacttaaagaggccggcgagcggcgtacggcctcgggtacgatccccgtctttcgatgacgttgatgatgggatcacaatctgcgacgaacgatccagggcaggctactcacatgcgccgacgcatccggccgttcgctggcggtgcaacgtgatattatcgccccactcccttcagttgccggataaggatcccgcatgatcgtcaactgcgaccacgacaacctcgacgcctggctggcgctacgcgcggcgctgtggcccacttgtccgttggaagagcaccgcgcggagatgcgcgaaatattggcttcgccgcaccacaccgcgtttatggcgcgggggctggacggcgctttcgttggctttgccgaggtcgcgctgcgccacgattacgtcaacggctgcgaatcgtcgccggtggcgtttttggaagggatttacaccgtcgaacgcgcccgccgccagggctgggcggcgcgtttgatcgcgcaggtgcaggagtgggcgaagcaacaggggtgcagcgagctggcgtcggataccgacatcgccaatctgtactcccagcgcctgcatgcggcgctgggctttgccgaaacggaacgggtggtgttttaccgcaaaacgctgggctgatcaggcaatcttgctttgccgctgatgcgccagctgctcggcgcgcagcaggatctcctgcagatcgtcctcatcgatatcgaacagatccccctccatcaacgcctcgtgcagatcggcgcgggtgatggaaacggcatcgatcggcagattggccggcttggcctccgccggcgccagcgcgtgcgggtagcgccgcccggccaggttattgaacagaatggccagcgccgccagcagcaccgagttcagcagcaccgggtacaacacgaagtggtagcccatctgatgaatgccggggccgccgaggatggcggtcagcgccaccgcgccgccgggtgggtgcaggcagcgcagcttgaacatcaggccgatggccaccgccgccgcaacgccgcaggccagacccggatcggggatcagcagaccggcgctcacgcccaccgtcgccgccagcgcattgccgccgacgatcgaccaaggctgcgccagcgggctgttcggcacgccgaacagcagcaccgccgaagcgcccatcggcgcgataaaccacaggttcacctcgcccaaaataaagtggctgatccagccggcgagcatcagccccaaaccggcgccaacgctggaaatcagcatctctcgtttgcccaccgccagcgggtgcggccacaggcgcgcgcatcccactttcactcgttctatccactgcgtcttcatgttacccaatacggctcaattcacgtgttggcaacaaatatatcacatcatcctgaaggagctcacggcgccgtaaaccgcgccgcccaagaacttttaggctaacagattgatttttagcctcccctcgacaatgatgaatgttccccccttaaccccgaggaaccgccgatgtctcaaccgatcaccgagctttataccgacagtgaatttttcagcccgtacgccatgtccgcctttgtcgtgctgacggaaaaaggcattccgttcaccgtgaagccggtggatctggcgaaagaagagaacaaagaggcagcctacgcggcgctatcgctcacccgccgggtgccgacgttggcgatcggcgagttccagctctcggagtcttcggcgatcgccgaatacctggaagacatccacccggcccacgccgtgtacccgcgcgacgtgaagctgcgcgccaaggcgcgcgagatccaggcctggttgcgcagcgatctgctgccgatccgcgccgagcgctcgaccgaagtggtgttcaacaacggcaagttcccgccgctgtccgaagccgcgcaggaagccgcgcgcaagctgatcgccgccgtggaaaagctgttgagccacgggcaggataatttgttcagggagtggtgcatcgccgacaccgatctggcgctgatgctcaaccggctggtaatgcacggcgatccggtgccggagcgcgtgcgccactatgcgcacaagcagtggcagcgcccgtcggtgcaggcctggctggcgttgtcggaaaaacggcgcgcctgaggaaaaaaatcggcggccacgacgccgccgttctcaatgccgagaaacaacatcactgcttgagggaaggcaaatcaccatccagagggcagatagcctaacaatgaagcgatggcgtacaccgcgctggccaggtacagcaacacaatgctgatctgcagcagcggatgcgtgatccagttgcactgccagcgtggggtttggtcgccgtgtttgcgcgcgccgcgcaggatcagcatcggcatgatcgacaggatcaccccgctgaacaccccggcgaagtagagcgcgttgacgaacgacaccagcccgctgtaggccagcgcgaacggcggcaccaccaccagcagcagcacgccgaagcggcgcagcggcaactcgtcgttgcccagccggaacttgtcgaagatattggtcaggaagctgccgcccaacccccagtacgaggtcagcatcgcgcacagcgcgaagatgttggcggagaagaacgcccactgccccagcgcctggccccaggaaatggtggccacatcggagatgtcatccagcccgctgagcgcgatcaccgacatcggcaccgccgccagcaaaatgaacgtcaccaccatgccgacgatgatcgccttcggcagctgctccggcttatcggcaaagccgcgcgccatctccggcacgatgtactgcgccgagaagcagaacaccaccacgttgaacaccggcaccatatagcgccagtcgccgtccagcaggttgcgcatatgagtggtgtctttcagcagcgtcgccgccaccagcgcggtcaacatcaccaccatgccgatgctgatgaacttctcgccgcggccgatcgctttcaaaccgagatagagcacgccggcggcgggtacgaagaacagcaggctgcccagcgccggcgagatgccgaacagcgattgcagcagcttgccgctgccggtcatgtaggcggtaagcgccccgacgctgttgacgcacaccgaagcgaacatcaaccaggcgcccaggccgccgacgtagcgcttcgccagcccgctcagctgcagatgcgcgcgggtgcgcagcgtggattcggcaacgtacagcatggtgatggtggtcaggctccccaccagcaccagccagaacagcagcggcaggaaacccgccttgctggaggcataggcgatggagagcacgccggcgccgatgttggtgccgacgatcatcgccaccccttcgaggaaacttaacgatttggcgggtgcaggtgctcgcaccccggcggcaagcgccggagaaacagagatattatcagacatgcatcatcctttatcgcccggcgacgctggccgccgggatgggttaacgtcctgacgctcaacggctcacatcgatacacaggtatttcagctccagatattcttctatcccgtagcgcgatccttcacgcccgagccctgactgtttcacgccgccgaacggcgccacttcgttggaaatcagcccggtgttgatgccgaccatgccgtactccagcgcttccggcactcgccactggcgcgcagcgttctgcgtgaacagataggcggccagaccgaattcggtgtcgttggccatggcgatggcttccgcctcgtcatggaaacggaacagcggcgccaccggcccgaaggtctcttctttggcgaagcgcatcttctgcgtcacgccggtcaccaccgtcggctggaagaaggtgccgcccagcgcgtgcggctgaccgccggtggcgatctgcgcccctttgatcagcgcgtcgtcgatgtggctctgcaccttcgccaccgcatcgctgtcgatcagcggcccctgagtggtaccttcctggctgccgtcgccgactttcaactgctcgaccgccgccaccagcttctccgccagccgctcgtagatgccgtcctgcacgtagatgcggttggcgcacacgcaggtctggccgctgttgcggaacttggaggccatgatgcccgccaccgccgcgtccagattggcgtcgtcgaacacgatgaccggcgcattaccgcccagctccagcgacagtttcttgatgctcggcgcgcactgcgccatcaggatgcggccgacctcggtcgagccggtaaagctcagcttgcgcaccaccgggctgtcgcacaacaccttgcccacctgcgccgcttccccagtcaccacctgcaacacgccggcgggaatgccggcgtcctgcgccagcttggccaacgccagcgcggtcagcggcgtttgctcggccggtttgacgatgatggtgcaaccggccgccagcgccggcgccaccttgcgggtgatcatcgccgccgggaagttccacggggtgatggccgcgcacacgccgatcggctgcttcaccaccaccaggcgctgcgaagcctgcggcgcctgcaataccgcgccgtccacccgcttggcctcttcggcgaaccaggtgatgaacgacgcggcgtaggtcacttcgccgcgcgcttccgccagcgatttgccctgctcggcggtcatcagctgcgccagatcttcctgcgcggccagcaccttatcagcccaggccaacagcagcgcggaacgctgcttggcggtcagctgtttccagtcgttttgcgcccgctgcgccgccgcgatcgcctgttgggtttcctcttcgctgaccagcggaatgctggccagttcggcaccggtggccgggttgatcaccgcttcgcgcttgccgctcagggcgtcgcaccattcgccgttgatcagacactggctgcgcaacagctcgggattgttcaatttcatgccgttcgctccttagtgggccagcgcgcgggacaggatgcccatcgccttggtgaactgatcgtccgggatagtcagcgggtagaggaagcggatcacgttgccgttcacgccgcagctcagcagcagcagcccttcctccatcgccttctgctgcacctgacgggtgatctccgccgaaggcttgccggtagccggatcgttgaactccaccgccaccatcgacccctgcgcgcgcacatcggcgatcgccgggctggttttgcgcgcctgctggagcacttccaccaggtgctgacccaagcgctgagcgcgctggcacagttgctcctcttcaatcacgtccagcaccgcgtgcgcggcggccaccgccagcgggttaccggcgtaggtgccgcccagcccacccggcgccggcgcgtccatcacctcggcgcggcccgccaccgccgacagcggcatgccgcccgccaggcttttcgccatggtgatcaaatcgggcttaacgctgtagtgttccatggcgaacagcttgccggtgcgggcgaagccggtctgcacttcgtcggcgatcagcagaatgccgtgctggtcgcacagcgtgcgcagcgcctgcatgaaatcggccggcgccacgttgaagccgccctcgccctgcaccggctccagcacgatcgccgccacctgcttgggatcgatatccgctttaaacaggcggtccaggctgttcatcgcgtcttcggtggtcacgccgtacagcgcgttcgggtactggccgtggaacaccgagccggggaatgggccaaagcccagtttgtaaggcgccactttgccggtcagcgccatggtcatgtaggtgcggccgtggaaaccgccgccgaaggtgatcaaccccgggcggccggtgtaagcgcgggcgatcttcaccgcgttttccaccgcttccgcgccggtggtgaagaaggcggttttacacggaccggcgatcggcgcgcgctggttgatgcgctccgccagcgagacatagctttcgtaaggaacgatctgataggcggtgtgggtgaaggcctgcagctgcttttcaatcgcggcgatcaccttcgggtgacggtggccggtgttcagcacggcgatccccgaggcgaagtcgatcacttctttgccttccacatcccacagcgtggcgttctctgcgcgctcggcgtaaaaaccacacatcacgcccactccgcgcggggtggcgtcctgacggcgttggttcaattctgcgtttttcatgctgttctctccggtcggtgccagttacacgtttcgttcacattcgtgaaacaatgccgtttatttacacaggatgtggccctataatcgagtgccagttacgaataattgagggatccaattgcgctcattgagtggtgatctgttgctgcagcgcctcggcgaacagcccgatgacaagctgcacaagcggctttacaacgcgatccgcaccagcattctcgacggcagcctgccgccctccagccgcctgcccgcctcgcgcgacctggcgcaggagctcagcctttcacgcaacaccgtgttaaccgtttatgaacaactgttggcagaaggctacgtgtcggcgcgcgccggcagcggcaccttcgtcgccgacacggtgccggacagctgcctgtccaccggcggcgccccggcggacggcagcgggcaaccgcggcgcgtcgacctgtcggagcgcggcgccacgctgctgcaccacgccagcgccagccccaaacagtggggggcattcattcccggcgtgcccgacgtcaacgcctttcctcatcagctgttcagcaagatccaggcgcgcctcagccgccgcccggcgccgcagcggctgacctacagcaatcagggtggcagcccggaactacagcatgcgttggtggagtatttgcgggtggcgcgctcggtacgctgctcgccggaacagatcctgatcaccgagggcatccatcaggcgatcgatctggtgacgcgcatgttgtgcaatccgggggatgacgcctggatcgaagagccgggctattgggggatccgcaatatcctgcgcatcaatgcgctgaacatctgcccgctggcggtagacgaggccgggctggtgccgccggagcagccgaccaacccaccgcggctgatcttcgtcaccccgtcgcaccagtatccgctcggctcggtgatgagcctggcgcgccgccaacggctgctggcgctggcgcgcaacgccggcgcttggatcgtcgaggacgactacgacagcgaattccgtttttccggccagccgatcccggcgttgcaagggctggaagccgacgcgccggtgatctatatcggcaccttcagcaaaacgctctacccggcgctgcgcctcggctatgtggtgttgccgccgccgctggtgcaggcgctgaaaaccgcccatgccgagctgtaccgcggcgggcacctgctgatccaaagcgcgctggcggagtttattcaggcggggcactacacggcgcatatccgccgcatgcggttgctgtatgcccggcggcgcgccttcctgaccgggttgatcgaacaacatctcggcaagcaggcgctcagcgaattcaacagcaacgccggcttgcacctgatcctcaacctgccggacgaggccgacgacgtggcgatcgccgccgccgccggcgcgcgcggggtgctggtgcggccgctgtcgcgctactatatgcagcccaaccgccggcgcggcctgctgatgggctttgcctgcgtgccggaagagcaaatggccgccgccttcacccagctgctggcgtgcatcaacgccccgcactaggtcagatcgccgcccgcctgcctcaccaggcctgaagccgccagccgtccgcttgcctgttcaggcggtgcgtcggcctcagcgcctgcaggaagtcttcgtcgtgcgacaccaccagcatcgcgccggggaaatccgccagcgcggtttcgatcgccagcgacgacgccagatccaggtggttggtcggctcgtcgagcaacagcagctgcgccggttgtcgccgccacagcgcgcaggccagcgccgccttcaagcgttcaccgccgctcagcgagcccagcggcaacgcgatgcgatccgcgccaagctgcagctgcgccagccgggtgcgcagcgccccttccgccagcggcgaatcctgtagccccagatgttccatcaccgacaggcccggatcgagctgcgacagggtttgatcgaggtaggccgtcgacagcgggcaatgacaatggccggaaagcgccgccagctgcccgagaagagtcttcagtaaggtggattttccgcagccgttggggccggtcaacgccacgcgcatcgggccgtcgatccgcaaatccagcggcggcgcgctgacgaacggcagttgcagccgctcgagcaccagcacctgcttgttcgcgttcacttcactgcccggcagcgccagcaacaccggcggttcctcctccacccgctgataggcttcacgcaccgccgcatcgaggctgtcgcgccgatcctgatgctgtttgcgcagcgtgcctaggctctccttcgccgccgacttgtaggccacccgttcgaaagaggcgatattcagcgtatcgacgacgcgcagcgtttgcgccgagcgccgctggctcatgtcgtgctctttctgttggcgagcgcgggtgcggcggcgctcctcgcgcgcatgctccagatcggcgcgcgccgcctgctgctccgtatcgcgctggcgccggtagtcctcatagttgccgccgtagctgcgcagcgcgccgggcgtcagttcgacgatgcgctccatgcgccccagcagctgccggtcatggctggcgatcaacagcccgccccgccactgatccagctgctgatacagccaggcgcggccggcgctgtcgaggtggttggtcggttcgtccagcagcagaaaatccgcctcgccgagcaaggcgccgcacagcgacgcgcgcatccgctcgccgccgctcagcgaactggcggatcgcaacggatcgaaggccggcaacccggcggcggcaaaggcgttttgcagacgatcgtgaagatcccagcgcccttccagacgatcgatatcgtccgtcaacggccgcccctgctcgagacgcgccagcgcggcgaacacctcaccgtagcccagcagctgcgccagcgtagtgtgcggcgcgatctccggctgctgcgcaacgtaagctactgcggcatgagattcaacgtgtccattgcccggcagatccaatccggcgatcaggcgcagcagctgggttttgccaacgccgttgcgccccaccaggccgcagcgcgaccgatcaaaagcgagatccagcgggccgaacagcgtttcgccgtcagcaaattggcaggtcagttgatgtaaaacgaaataaggggactgcactaaatgagccataagcactcctgaatgagatcaaaacatccccacagggcgcgagagcgcacggcgtgggaccagatatcaacaggcgtggttgttcattttcggttatggctccgcagagagaaggaatttgcaacgcgtaaaggctaaccgatcttttgttcgttatgcaaacagagtctgagattcatgacatctatcacattcggcgcaacgcagattcccaagcggcgcgacaacggctagatttatctcatccgaccacttgtgttcacataattataacaacgggccccgatttcacccgatggagagtgcaatgagcaattaccctcacctgctggcgccgctggatctcggcttcaccaccctgaaaaaccgggtgctgatgggatcgatgcataccggcctggaagagctgcccgacggcccgcagcgcctggccgcgttctatgccgagcgcgccgccgccggcgtggcgctgatcgtcaccggcggcattgccccgaacgaacagggcgtggtgtttcgcggcggttcgctcctcaacagcgaggcgcaattgccccaccaccgcccggtgactgaagccgtccaccgggcgggcggcaaaattgcgctgcagatcctgcacaccggccgctacagctatcaacccaagctggtggccccttccgcgctgcaggcaccgatcaacccgtttacgccgagcgcgctcagcgaagcggagattgagcagactatcgccgacttcgcccgctgcgcggcgctggcgcagcaggctggctatgacggcgttgaggtgatgggatccgagggctatctgatcaaccaattcttgacgacgcgcaccaaccagcgcgacgaccaatggggcggcagcttcaccaatcgcatgcgcttcgccgtcgagaccgtcagggcggtgcgccaggcggtgggcccggaattcattttgatctaccggctatcgatgctcgacctggtggaagacggctccagctggcaggagatcgagcagctggcgctggcgatcgaacaggcgggcgccacgatcatcaataccggcatcggctggcacgaagcgcgtattccgaccatcgccaccatggtgccgcgcgccggattcagctgggtgacccgcaagctgatgggcaaggtcagcatcccgctgatcaccaccaaccgcatcaacgatccggcggtggccgagcaggtgctggcggacggctgcgccgatatggtgtcgatggcacgcccgttcctcgccgacgccgcctttgtgcagaaagccgccgaagggcgcgccgacgagatcaatacctgcatcggttgcaaccaggcctgtctcgaccagatctttgaaggcaagctgacttcctgtctggtcaacccgcgcgcctgccgtgaaaccgaaatgccgctgacaatggcggaaaagccgaaaaaactggcggtggtcggcgccggccccgccgggctggccttcgccaccaccgccgccagccgtggtcatcaggtgacgctgttcgacgccgccgagcagatcggcggccagttcaacatcgccaagcagatccccggcaaggaagaattccatgaaaccctgcgttacttccgccgccagctggcgctgcgtgaagtgacggtcaggctgggcgtcaaggtcgaagcggcggatttaagcgaattcgatgaggtgatcctcgcctgcggcatcgtgccgcgcaccccggacatccccggcatcgggcacgccaaggtgctgagctatctggacgtgctgcgcgataaaaaaccggtcggccagcgggtggcgatcgtcggcgccggcggcatcggcttcgataccgccgaatacctcagccagcacggcgtgtccagcagcctggatcaggcggaattcaaccgcgaatggggcatcgatggccgccttgaacagcgcggcgggctggcggcgcaaggcccgcaggcgccgcgcgccgcccggcaaatctacctgttgcagcgcaaaaccagcaaggtgggcgaaggcctgggcaaaaccaccggttggatccaccgcgccagcctggcgatgcgcggcgtgaagatgctcaacagcgtcagctatcggctgatcgacgacgaagggctgcacatcacccgcgccgagcaagacagctgcctaccggtggacacggtggtcatttgcgccgggcaggaaccgcgccgcgaactgcagcaaccactgctggcgatggggaaaaccgtgcacctgatcggcggcgccgacgtggccgccgagctggacgcccgccgcgcgatcgatcagggtacgcggttggcgatggcgctgtaaaaaaggggcgcccggcgcccctgatattgatgacaaacctcatccccatgccgggttggcagagagcagcgaatagagaacaaggaaaatcaatttattgattttcggctgatatccacaaagggggaaaaaccacgctttttccccctttgtctacagcctgaggggcgcccggcgccccttgttattcacgctcagcgacgcgcgccggatttcaccgctctaaggatcacgaacttcttgttcgaggccaccagcgtgcagttgccgaacaggcgcttgagcttctgatggtagtcgaggtgacggttgccgacgatgcgcagttcgccgcccacctgcaggcagcgcttggcgtcgcagaacatctgccaggcggtgtgatcggtaatggcgtgttgctggtggaacggcgggttgcacagcaccgcctgcacgctttcacgctcgatgcctgccagcgcgttgttcacctcaaactgacagcggtccagctcttgcggcaggttgtgctccacgttcagctcgctggaggccaccgccatgtaagattcatcgacgaaggtcacctgcgcttccgggttttgcgccagcgccgtcaggccaatcacgccgttgccgcagcccagatcgacgatatggccgttcaggccgcgcggcagatgttccataaacaggcgcgcgccgatatccaggctgccgcgcgagaagacgttggcgtggttatggataagccaatcggtgccgtccagcgtccagtcggtggtttccgccgccgccggcgggacgatatccgccgcctggcagaagatcagacgcgctttcttccacgccaggctggtgcgcgtcgggcccagcactttttcaaacagctgcatcgtcgaagtgtgcacgtcgcgcgctttggcgccggcgacgatcagcgtgtcttcggtcacgacgtggcgcagcgcgcgcagctgctgttccagcagcgccagcgctttcggcacgcgaatcagcaccaccgccggcgccgccggcagctcggccaggctgtccagcagtgtgacctgctcaggatccagaccgttgagtttgaggttgtggcgcgtcgccagctggctcatgtacgagtcgctgacgctgtaagggcgatgcgcgtgcaacgcacaggccagggtgccgaagttatcgttgaaaatcagcaccgggcggccgccgatatctacgttttcaagctgttgcagcagatattcgtccgccgcttcccacgcctgcagttgggtggattcttcctgttggggataacgctccagctcaagttgctgtgttcccagatcgagttggctcattgcccctcctgactgataaaatttgggctgtttatcccctaaaaacgcccgtcagtaaaatgttttttcggataaattgcgtattgcgccgcgtatctgaaaacccgcgtcccttttctcctttaacaacattaacctttccctcccaagcacccatgtcgacgtttttttaacctgacgaggtgtaactttaaatgttacactgccagtccctatggaagggggaaagcatgattaaatctttccgcgatcgctatctggagcagttctatctggaaggcaaacgcagccgtctgatccccggcgtgctcgagcggcagttggccagaaagctcgatatattggccgccgcgcagcaagagcgtgatttgcatcaccccacgggtaactattacaagcggctatccgggccatttcagggatggtcaagtctgcacgtcaatatgcactggcggctgatgttccagtggcggcatgatgccgctgaaaaaatttacctcgatcctcaccaagatacctgaacgagggggaacctatgttggaaaccacgactcgcgaacccaccacggtgggggaagtgctgcaggaagagtatttaacgccgttgggcatcggccaggaagaactggcgaaggtactgggcgtcacccgtgccactgttaaccgcctgtgcaacgggcatcgacgcatgagcgttgccgaggccaacctgtttgccgacctgttcgaaacgaccgccgacttttggctaaacctgcaggcggcacacgatcgctgggaagccagacaggccgatgcgcaacgtgtgcggctgcggccaatcaaagaaatactgggacgcaatatcactcatgcatgacatcgaactcgcctacctgcaaggctacccaacgcatctgcaaagccaggtgcagcaactgatccatcagaatcggctgggagacgtgctgctgcagcgctatccgcaggtgcatgagtgcaccaccgacaagtcgctgtatcagtttaccgtcgatctgaaaaaccagtatctgcgcaacgcccagccgctgagcaaggtggcctatgacagcaagatccacgtcatgaagcacgcgctgggcctgcacaccgccatctcgcgcgtgcagggcggcaagctgaaggccaaggcggaaatccgcgtggcgacggtgttcaaggtcgcgcctgagccgttcctgcgcatgatcgtggtgcatgagctggcgcatctgaaagagaaagatcacaacaaggcgttctacagcctgtgctgccacatggagccggattaccaccagctggagttcgatacccggctgtatctgacgcacctttcgctgttcggcgagctgtatgcatagcgagtgagggcgtgataatctgcggttttaggctggaccggagctcgctatgattcgctttgccgtcgtcggcaccaactggattacggaacgttttattgatgccgcccatgaaagcggcaaactcaagctgagcgccgtgtattcacgctcgctggaacaggcgcaggcgtttggcgccaactatcaggtcacgcagtttttcgactcgctcgaggcgatggcccagtccgatgccatagacgcggtgtatatcgccagccccaattccctgcactgcccgcaatcgctgctgttcctgcgccataagaagcacgtgatctgcgaaaaaccgctggcctccaaccagcgcgaagcggaacagctggtagcctgcgcgcgggaaaaccaggtggtgctgttcgaggcgttcaaaagcgcctatctgccgaattttctggcgctgcaacaggcattgccgaacgtcggccggttacgcaaagcctttatcaactactgccaatactcttcgcgctatccgcgctacctcgccggcgagaaccccaacacctttaacccgcagttctccaacggctcgatcatggatatcggctactactgcctggccagcgcggtagcgctgttcggcgcgccgcagtcggtgctcgccagcgccacactgctcgataccggcgttgacgcccacggcaccgtctgcctgaactacggtgatttcgacgtcacgctttcccattccaaggtcagcgactcggcgatccccagcgagatccagggagaggaaggcacgctgattatcgacaagatttccgagtgtcagggcgtggcgctgacgccgcgcggcggcaaccgccaggatctgagccagccgcagcacatcaacaccatgctgtatgaagcgctggccttcgctgagctggtggaaaatcaccgggtggaacatccagggctggagaattcgctgatcgtcgcccgcctgctgaccgatatccgccgccagaccggcgtcgtcttccccgccgacggagaatgagatgaaaccgttgctcgtgatgcaaaccggcgacgcgccgcaggccattcgtcaggaattggccaactttgatggcatgttcctgcaacaaggcaatatcgacgccgaacgcgcgcacatcgtgcacctgcccgccggcgaacggccgttgccgcctgccgcctattgcggcgtagtcatcaccggctcgccggcgatggtgaccgaacggctgccgtggagcgaggaagccgccgaatggctgcgccaggcgatggcgatcaaactgccgctgttcggcgtctgctacggccaccagctgttggcctacgcgctcggcggcgaagtgggctaccacccgcagggcatggaggtgggtacgctggagatcgaactgctgcccgccgcggccgacgatcggcggctcaccctgctgccgccgcgcttcaaggccaacctgatccactcgcagagcgtgctgacgccgcccgccggcgcgcagacgctggcgcgttcgcagcaggacgcgcaccaaatcctgcgctatggcgatcacgccctgaccacccagttccacccggaattcaacggcgcggtgatgagccagtatctgcagtggctcggcgagctgcatcccgagcagcaggcccgctaccaacagcaacaacaacaggttagcgacacgccattcagccgcctgctgctgcagggattcgtcgtcagcctcggcgcgcaaaaagcgatggccggttaacgcgattcacgttgaccgccgacacattttgcattactttctgctctgcaaaggggagtaacttcattgccggtcaatcgtcattacgatgcgcaagcatccggttaccgggcaacctgatgtcaaaggtgtaaccaccttcatcaacgttgtaagtgagaccttgccggaaggcgaggtttgcttgcagcgttcacagagcggctggcgtcttccgacgttggccgtttttgtttttgaaggatacctctgatgatgaattccgttggcacaccgtggttatggggcagctttgccgccgttatagtcgtgatgctcgcaatcgatctcctgttgcagggccgtaaaggcgcgcacaccatgactatgaagcaggccgccagctggtcgctggtgtgggtcagcctctccctgctgttcaacttcggtttctggtattacctgaatgaaaccgccgggcgcgccgtcgccgatacccaggcgctggccttcctgaccggctacctgatcgaaaaagcgctggcggtggataatgtgttcgtctggctgatgctgttcagctacttcgccgtgccggccaacctgcaacggcgggtgctgatctacggcgtgctgggggcgatcgtgctgcgtaccatcatgatcttcgccggcagctggctggtcagccagttccagtggctgctgtatctgttcggcgctttcctgctgttcaccggtataaaaatggcgctggcgaaggaagatgactcggcgatcggcgacaaaccgctggtgaaatggctgcgcagtcgcttgcgcatgaccgacagcctggaaggcgagcgtttcttcgtgcgccgcaacggcattctgttcgccaccccgctggtgctggtgctgatcctggtggaactgagcgacgtgattttcgcggtggacagcattccggcgatcttcgccgtgaccaccgatccgttcatcgtcctgacctccaacctgttcgccatcatgggcctgcgcgccatgtacttcctgctggccaacgtggcggaacggttctcgatgctgaaatacggcctgtcggtgatcctggtatttatcggcatcaagatgctgattatcgacttcttccacatcccgatcggcgtgtcgctcggcgtggtggcgggcatcctgacgttcaccttgctgatcaacgcctgggtcaatcaccgcaacgatcgcctggcgaagaaataaccataatctgttatccggggcgctagtcgccccgtgattgtttggcaattcccgcaaaacgccaaacgttattgcgatcacacaaatgtaaccagtatgttatcaagtgttgatccgcgctcagaatttcaccctcgcctctttccaacatcattcgattgctgaatactgattcggcaaacacacttagttacagaatcatataaagctgcctggcgtcgttcccgccgcggcggccagataacatcaggaagaaagcactatgcaaaaactactacaaaagatcacgcagggcagcctggtcaaacaaatcatggtcggcctggtggccggcattctggtggcgctggtttcaccggcggcggcagcggcggttggcctgctcggcaccctgttcgtcggcgcgctgaaagcggtggcgccggtgctggtgctgattctggtcatggcctcgatcgccaaccataaacaggggcagaagaccaacattcgcccgatcctgttcctctatctgctgggcacctttgccgccgcgctggtggcggtggtcgtcagctttatcttcccttccacgctggcgctgaccaccggcgcgacggacattaccccgccgggcggcatcgtggacgtgatgaagggcctgttgatgagcgtggtggccaacccgttccatgcgctgattaacgccaactacatcggcattctggcgtgggccgtcgggttggggctggcgctgcgccacgcttccgaaaccaccaaggggctgatcaacgacatgtcccatgcggtcacgctggtggtgcgcgcggtgatccgctgtgcgccgctcggcatcttcggcctggtggcctccacgctggcggaaaccggcttcggcgcgctgtggggctatgcgcaactgctgatggtgttaatcggctgcatgctgctggtagcgctggtgctcaacccgctgatcgtttactggaagatccgccgcaacccgtatccgctggtgttcgcctgcctgcgcgagagcggcgtgaccgccttcttcacccgcagctccgccgccaacatcccggtgaatatggaactgtgcaagaagctgaacctgaatgaggacacctactcggtttccatcccgctgggcgccaccatcaacatggccggcgcggcgatcaccatcaccgtgctgacgctggcggcggtaaacacgctgggcatcgcagtggacgtcccgaccgccctgctgctgagcgtggtggcggcgctgtgcgcctgcggcgcctccggcgtggccggcggttcgctgctgctgatcccgctggcgtgcaacatgttcggcattccgaatgacgtggcgatgcaggtggtggcggtcggctttatcatcggcgtcctgcaggattcggcggaaaccgccctcaactcctccaccgacgtgctgttcaccgccgcggcctgccaggcggaagaccagcggctggcgaacgaagatccgctgaaggtgcgttaatcgcgcgttgcttcatcaaaaaggcgctccttcgagcgccttttttgtcagccttacagcgtcaccccgcttttaaagatcgccagctcgcggaagtcgttggtttcattacgcgccggacgcccgttagcgatctcgacaatcagatcgatgaagcggctgagcaacgtctccatcgccacgccgtggatcaggctgctggcgtcaaaatcgatccagtgcggtttcttcgccgccagctcgctgttggtggccagcttcaccgtcggcacaaagccgccgtacggcgtgccgcgcccggtgctgaacagcaccatatggcagccggcgccggccagcgcgctggtcgctacggcgtcgttgcccggcgcgctgagcagattcagccccggcacgcgcagccgctcgccgtatttcagcacgtcaaccacctggcttaaccccgccttttgggtgcagccgagcgatttctcctccagcgtggtgatgccgccggccttgttgcccggcgacgggttctcataaatcggctgctgatgggcgatgaaatagcgtttgaaatcgttgatcatgtcgacggttttgtcgaaggtctccccatcgcggcagcggctcatcagaatgcgctcggcgccgaacatctccggcacttcggtcagcaccgtggtgccgccgttggcgatcacataatcggagaaccgccccagcagcgggttggcggtgatacccgacaatccgtccgaaccgccgcactccaggccgaacttcagctcgctcaggcggcccggctcgcggcgatcgtggcgcatctcccggtacagctcgtgcaacagcgccagcccggcttccacttcgtcgtcctgctgttggcacaccataaagcgcagccgccgctcgtcctctatccccaacgtggcgcgaaaggcatccacctgattgttctcgcaacccagcccgatcaccagcaccgcgccggcgttgggatggcgcgccaggttctgcagcatgatgcgggtgttggcatgatcctgccccagctgcgagcagccgaacgggtgactgaacagatgcacgccgtcgatcccctctgcctgcgtttgctgcaaaaagcgttgctggatctggcgagcgataccgttgacgcagccgacggtcggcacgatccacagctcattgcggatccccacttcgccgccggcccgtcggtacaactgcacctcgcgatccgcggcctgcggcggcaacgtcgggaactgcggttggtaacggtagctgtccagatcgctcaggttggttttggcgttttgcgaatgaatatgctcccccggcccgatggccgcgagcgcatggccgatcggctggccatatttgatgatgtcctcgtccttggcgatcgggccgagcgcaaatttgtgcccgcgcgccaccggctgcgccagttggatgaccgcgccttccagctcaacgcactctccggcagccagatcgcgcagcgccaccgccacgttatcctgctcgtgaatctttatcgtactttgcataaaccggtcccggataacggctacgccagttcaatggcgaaatagtctttggcgttgtcgaagcagatgtttttcaccatttcgcccagcagcgcgatatccaccggcgcttcgccgtccgccacccaacgaccgatcatctggcaaagaatgcggcggaagtattcatggcgcgtgtacgacaggaagctacgactgtcggtcagcatgccgacgaagcggctcagcagcccgagctgggccagctgcgtcatttggcgctgcatgccgtccttctgatcgttgaaccaccagccggaaccgaactgcatcttgcccggcgtgccttccccctggaaattgccgatcatggtgccgatcacttcgttatcgcgcgggttgaggcagtagagaatggttttcggcaggccgccctgccgcgcctgggcatccagcagccgcgacagcggctccgccagcggccgatcgttgatcgaatcgaaaccgatatccggcccgacggcggccagcatgcggctgttgttattacgcaacgcgccgatgtgatactgctgcacccagccgcggcgccggtattcgccggccaggaacagcagcaccgcgcttttgaactgggcgctctgttccggcgtcggcagctcgccgttcaggcggcgcagcaggatcgcatccagcgccgcttcatcggcctcgccgaacaccaccacgtccagcgcatggtcggccaccttgcagccgtgggcggcgaagtgatccatgcgcttgtacagggcgtcgcacagcgcgctgaagcggccgatgacggtatccgccgccgcctccagctgtcgcagatagtcattgaagcccggtgcatcgacagtgaaagccttgtccggccgccagctcggcaataccttgatatcgaagccacgatcgtcggcgatcgcccgatgatggcgcagatcgtcgatcggatcgtcggtggtgcccaccattttcacattcatctgccgcatgatgccgcgcgcgcgaaactcatcctgcgccagcagcgcattgccgcactgccagatctcatccgccgtggccggcgacagcagcgtatccgtgatgccgaacggccgacgcagctccagatgcgtccagtgatagagcgggttgccgatggtatgcggcaccgtggcggcccaggcgtcgaatttctcacgatcgcccgcatcgccggtacacagccgctccgccacgccgttggtgcgcatcgcccgccatttatagtgatcgcctcgcagccagatatcgtacaggttgctgaagcgggtgttctccgcgatctgctgtggcggcaaatggcagtgataatcgaaaatcggctgtggcgccgcatagtcgtgatacaagcgccgggcaaattcgttgtccagcaggaaatcttcgctcaaaaacgtcgccatctcgggctccttacttgccgtgcggcacggggttcgaatcacaaaagttatcacaccaattttcacaggcgtccagcaaatttttcccatgagctgttggtttaaggtcctttaatccctttttcgctcaattttacggcaagtgtgcggcgcaaacgcactatttcaccggcgacagtatcgctcaggcgaataattccttttgtgatatcactcaacttttaaacctgtatgacaggttattgtctcgccagccgcatcgacggccacaccttcaaacggggagacatttcggatgcgtaaaattaaagggttacgctggtacatgattggactagtgaccatcggcaccgtgctgggctacctgacccgcaacgccatcgccgtcgcggcgccgacgctggaagatacgctgcacatcaccacccaacagtattcctatatcgtcgccgcctattccgcctgctacaccgtgatgcaaccggtggcgggctacgtgctggacgtgctgggcaccaaggtcggctacgccatgttcgccattctgtgggcgctgttctgtatgggcaccgcgctggccaacagctggggcggcctggcgctggcgcgcggcgcggtcggcatggcggaagcggcgatgatccccgccgggctgaaggccagcagcgagtggtttccggccaaagagcgttcgatcgccgtcggttatttcaacgtgggttcatcgatcggtggcatgatcgccccaccgttggtggtatgggccatcgtggcgcacagctgggaaatggcgttcatcatcaccggcgtgctgagcctgatctgggccatttgttggctgctgttctacaaacacccgaaagatcagaagaaattgagccaggaagagcgccgttacatcctcgaaggccaggaagcccagcaccagacctctaacgccaaaaagatgtccgcctggcagatcgtgcgcaaccgccagttctggggcatcgcgctgccgcgctttctggcggagccggcgtggggcaccttcaacgcctggatcccgctgttcatgttcaaggcctacggttttaacctgaaagagatcgccatgttcgcctggatgccgatgctgttcgccgatctcggctgcatcgtcggcggttatctgccgccgctgttccagaagtatttcaaggtcaacctgatcgtctcacgcaagctggtggtgacgatgggggcggtgttgatgatcggccccggcatgatcggcctgttcaccagcccttacgcggctatcgcgctgctgtgcgtcggcggcttcgcccatcaggcgctgtccggcgcgctgatcaccctctcttccgacgtgttcggccgcaatgaggtggcgactgccaacggcctcaccggcatggcggcctggaccgccagcacgctgttcgccctggtggtcggcgccctggcggacaccctcggcttcagcccgctgttcgccgcgctgtcggtcttcgacattctcggcgccatcgtcatctggacggtgttgcaaaaccgtccggccgccgaaacccagccggccacgctgcaaccggccccggcgcgcagctgatcccgccgcccggccgccgcgccgggcctcttgctcctctggcagcggtgccgaataagtggtataacaaatccgatggccacgcgccccttcccaccgcaccgtatagagcattcactatggaattcaccgaaaccagacgcctgtatcagcaactggccgccgagcttaagcaacgcatcgaaagcggccgctacccggtaggcgacaagctgccggccgagcgatacatcgccgaagagatgaatgtcagccgtaccgtggtgcgcgaagcgatcatcatgctggaagtggaaggctatgtggacgtgcgcaagggatccgggatccatgtggtgtccaaccagcaaaagcacctggtggtgccgggcgacagcatcgagttcgccaccgccggcccgtttgagctgctgcaggcgcgccagctgattgaaagcaacatcgccgagttcgccgccacccaggtgaccaaacaagatatcgtgcagttgatggagatccaggagcacgcccgtaaagaggatcgcttccgcgactcgcagtgggatctgaagttccacgtgcaggtggcgctggccacccagaacaccgccatggccaccatcgtggaaaaaatgtgggtgcagcgggtcaacaacccttactggaaaaagctgcacgagcatatcgacgaacgctcgatcgccagctggtgtgacgatcacgatcagatcctcaaggcgctgatgcgcaaagacccttacgccgccaaactggcgatgtggcagcacctggaaaacaccaaacagatgctgttcaacgccaccagcgatgacttcgaatacaacgccgatcgctacctgtttgccgagaatccggtggtgcatctggatggcgtgaaccacgagcagaaatagccacggcggtcaaaaaccgtcggcttatgtcaggtaatgtaaaatccgctgaatcgatgccggaaccgccgtttgccgtgtactatttcaccgtcggcaacgtagatttccctgttgccaatcgtgctattttggtagagttagcccacttttttacccattgctgcgggggcgggacgcgaataaatgcgctggttgtttgccatgctgattgctgttttctgctggaccggttcggtctccggccaacagctatgcgtggcgtcacccaagccaacccccagcgcgctgagcagcctgccgctgctggcggagccggcgctttccccctatgatcatgtgtatcgggcgccggccgaagcgcgccgcaaagcccccggcaagttgccgctgctgctgcccagagcgcactctttctccggttcgctgctcgcatcctccctgccggcgccggtctataccctggccgcagagccgggttaccgaattcgcttcccccgccaggacaccccggctcccaaccggcttgcccaggtcgactggatgctggacgcttccaggcaacagagtcgccaggccggttggaaagaaagcaacatgcagtaccgtggcacgctgacttaccacctatgaccggtgtcgcaccgcttagaaaccttaaagcaacgccgtttcatcgttatcagcactcaggatcgccgcgcgctttcagctcacgcccgctccgccgctgagataaaaataaacaatgacgttttaggaacaccggatggacatcattaaagaactgatacatgccttatggcagcaggattttgagacgctggcgaacccctcgttggtgtggaccctctacatcctgctgttcatgatcctgtttttggagaacggcctgctgccggccgctttcctgccgggtgacagcctgctgatcctggtcggtgtgctgatcgccaaaggcaccatgggcttcccattgaccatcgttatcctgaccgtcgccgccagcctggggtgctgggtcagttatatacaaggccggtggctcggcaatacgcgaacggtgcaaggctggctttcgcatctgccggcccactaccatcagcgtgcacataacctgttccaccgtcacggcctttccgccctgctggtcggccgcttcctggccttcgtgcgcaccctgctgccgaccatcgccggcctgtccggcctgagcaacgcacgcttccagttcttcaactggatgagcggcctgctgtgggtcttgatcctgacgacgctgggcttcgccctggggaaaacgccggtgttccgcaagtatgaagatcagctgatgttctgcctgatgatgctgccgctggtattgctggtggtcgggctggtcggctcgctgatcgtgttgtggcgcaagaagcgcgccaacagccagaatccggggaaaggggcgtgacagcaaagcgcccgcgctggcaatacgtcctgatgatcgcgctcgccctgctggcgttggcgacgctgttggtgccctgcatggtgcgcaccgagagcgagctgcgcatccgcgccagccagcaagggctgtcgctgcccgacggcttttatgtctaccagcgcctggatgaacgcggcatccgcatcaaaagcattacgccggaaggcgatggcctggtcatccgtctggattcgccggagcagcagttgctggcgcgcgaagctttgcaaaccattctgccacccggttaccacatcgcattgagcgagtcccccgtgccgtcgcattgggtgcgcgaatttgcgcgctccccgctcaatctgggataatcccccttcatatgaaggggtttcctttcattgccataatcttcattttcattcgcatcgattagctcaagaattaatcagtcagcactgggtcacggctgattctttgggggctcgccggtttcatgactatgctgaagggtaacttcagccggcgatgaacgccctcctctcgcgctgccgccttcggcagccaggaaagcggatgcctgttcaggcatcccatgaacaaggaactgaaagatgaaattacgccactccctgttactgctgttgccactctgcacgctgccggccctcgcttcggccgcagagggcggttgcgccgccaaagcgcaaaacatccaacagcaaatcgactacgccacccaacacggcaacacccaccgcgtggacgggctgaaaaaagcgctgagcgaagtgcagactcactgcaccgaagccggcctgcaggccgaacgccagaaaaacatcgcagagaaacagcgcaaggtcgaagaacgccggcaggagctgaaagaaacgcagcaaaccggcaagctggacaaggtcgccaagaagcagcaaaagctggcggaagcgcaagctgagttgaaacgcgcccaggcggaataattttttacaccagcggatttatcgatgagagccccatcacacgggatttcttaagcatatggaattgatgtctggtgttatctgctggccatcacccctttgctccggcgaaaaaatccgctatgttaaaagtctgtcgaaataaacgttaaggaataatcacatggcacatgattcaaatgcagaaaacttacgcgctgaactgaagtccttagccgatacgctggaggaagtgctgaactcctccaccgacaagccgaaagccgagctggagaagctgcgttcgaaggcggaaggcgcgctgaaagagacccgcgctcgcctgagcgacgccggtgacaagctggcttcgcaaaccaaacagatcgccggccaggccgacgactatgtgcgcgacaacccgtggaccggcatcggtatcggcgcggcggtcggcgtggtgctgggcgtgctgctcgcgcgtcgctaatcatggctgaacaaccgcaagtgcgcgcgcagggccccgccaaaggggttctggatatcggtcagcgcatcatcacgatcctggtcggcatggtggaaacccgtgtccggctggcggtcgtcgagctggaagaggagaaagccaacctcattcagctgctgatcatggccggtatgacactgctgttcaccgccttcggtttgatgagcctgctgatcctgatcttctgggccatcgatccggtctatcggctggtggcgctgggcgcgacaaccggcgtgctgctgttcctcgccgtagtcggcaccatctggacgctggtcaaggcccgtcgcaccacgctgctgggcgccacgcgcaagcagttggagctcgaccgcgccgaactggagcgcgagccatgagccgccgccgctacctggaatggaaaaaagagaggctgattcgccagatccagcaacagcgtctggatctggccgaacacaagtctttgtggctggaaaaaaccgaacgcattgaccgcggctggcagaccgtttttggcctgcgccgctatctggtactcggttccagcgtcatggcgctgtacggcatccgccaccccagcaagatgatccgctggtcgcgtcgcgctttcggtgcctggagcgctatccgactgtttaaaaagaccttctccgccaagtaagccccgcgtttttccttcaaacatcctgttgctctgccctcgttttccccttaaaacagcgctgtttatcccgagggctgggcaacctgctgacaagcgtcagtttattagcacgctaaagattcagattttttgaaaaattacgacagttttacttgctaacaacctgagcacttcccgattaacattcactccatcaatacgatatgggccgaacagggtgagagacccgatataccgcccgttgatatgactaccgccgaacaggcacacaaaaacactttggagtagatgatgaaaaaattagaagatacaggtttgctggttgctcgtatcctgatgccaatcctgtttatcgtggcaggctacggcaaaatgggtgacgcttatgccggaacccaacagtacatgcaatcgatgggcgtgcctggcttcttgctgccgctgaccattctgctggagtttggcggcggtctggcgatcctgttcggcttcctgacccgcaccgtggcgctgttcactgccggtttcaccatcctgaccgcgctgctgttccacactgattttgcggaaggcgtaaaccagctgatgttcatgaaaaacctgaccatcgccggcggcttcatcgtgttggcggtcgcaggcccgggcggcttcagcatcgaccgtcttctgaacaagaaatggtaatctaaactgtcattcagggcccggcatgccgggccctgtcgtttttcactcggacaccaaggagattcccatgggacaactcgtcgatggcgtttggcaagacatctggtatgacacgaaatctaccggcggccgtttcaaacgttcaaccgctcagtttcgcaattgggtgaccgccgacggtcagcccggcgaacacggcgcgggcggcttccaggccgaagcgggccgttatcacctgtacgtttctctcgcctgcccctgggcgcaccgcacgctgctgatgcgcaaattgaaagggctggagcagatcattccggtctcggtggtgcacccgctgatgctggaaaacggctggaccttcggccaggattttcctgaaaccaccggcgatccgctgtatcacgccgacttcctgtaccagatctacctgcgggcagacccgcactacagcgggcgcgtgaccgtgccggtgctgtgggataaacagcggcaaaccatcgtcagcaacgaatccgccgacatcatccgcatgttcaacagcgcgtttgacggcgtcggcgctcgggctggggactactacccgaccgatctgcgcggcaagatcgatgagctgaacggctggatttacgatcaagtgaacaacggcgtgtacaaggccggtttcgccaccagccaggaagcctatgacgaagcggtcaacggggtattcaacgcgctggagcgccttgagcagatcctggggcaacatcgctacctgaccggcgatcggctgaccgaagccgacctgcgtctgtggaccacgctggtgcgtttcgatccggtgtacgtcacccacttcaagtgcgacaaacaccgcatcagcgactatctgaacctgtacggcttcctgcgcgacatctatcagatgccgggcatcgccgagacggtcagcctgccgcacattcgcaaccactactaccgcagccacgccaccatcaacccgcacggcatcatttccatcgggccggcgcaggatctggacgagccgcacggccgcgaccagcgcttcggttaaggcgaaaaaaatccccttgccgcccggcaaggggatgtcatcccaccgatgttaacgttgcgcgaacaggcgcgggatttcgcgcaggaaccaggccttcgcctcccccatgctgtcgcgccgccaggccatgatgatgtcggcttcgcggctgtattccggccccaccacgcgcagccggccggcttcgatatctttctccaccatcggatacggcatggtcgccacccccaacccggccagcagcgccagacgtttgtcttcaatggtgctcaccgtcaggcgctgttgcttgtccagcagctgtacggtcaacaccgggcgctcgcgagcggtatccgccaccgcgatgccgcggtatttcacgcgggtcacctcggacaacggctccggctcctggtggataggatgatccggcgcggcgacataaacgctcatgaccttgtacagtttgcgggtgttgatctccgaggatgcgcggaaatgcatatccggcgcgatcacaatgtcggcgcgcccctgttccagccgctcccaggcgcccgccagcacttcggtgaaaatcgacacctgggtgttggccttcagcgccagcttgtccaccagcgggaacagcaggcttggcggcgacagcgcttcactgacgatggtcaggtgggtttcccaaccgcgcgccagcgcctcggcgtcggtggtcagcttatcggccgcctccagcagcacccgcccgcgctccagcaacatgcgcccgacgttggtgaacttggtgcggtggcccgaacggtcgaacagcaccacgtccaattcttcttccaatttttgcatggtgtagctgagcgccgacggcacccggcccaattcgtcggcggccgcggcgaaactgccacgccggtcgatcgcatccatcactctcagcgcctcaagcgtgagcgcccgatctctggccatcacatccctctgtcaggaaatttgaatatgccgaccagattaactggctaacaatccgacgtccagatgcttaccatttggataatgaatttagagagccgattgccatgattacatgcagaacagcacaacaatgcgggcaagctgactttggttggctgcaggctcgctacaccttttcctttggtcactacttcgatcccaaactgatgggctacgcctcgctgcgggtactgaatcaggaggtgctggcaccgggcgcgtcgttccagccgcgcacctatcccagcgtggacatcctgaacctgatcctgcagggcgaggcggagtaccgcgacagcgacggcaacaccacgcgcgccaaagccggcgaagcgctgctgttggccacccagccgggcctgagttacagcgaacagaacgtcagcagcgatacgccgctgacccgcctgcagctgtggctggacgcctgcccggaacgcagcaacgagcgggtgcagcgcctggcgctgccggcggcaggcaacctgctgctggcctcgccggacggcgcgcagggcagcctgcagctgcgtcagcaggtttggatccaccatctcgatctgcagccgggcgaagaacaaacgctgacgattaacgggccgcgcgcctatttgcagtcgattcacggcaccatcgccgctaccggcgagcgccacgaagcgcaacgcctgacctgcggcgacggcgccttcgtgcgtgaggaaaaccgcctgacgatccgcgccgaaacgccgctgcgcgcgctgctgattgacctgccggtgtaagccggccgaaaaacgaaaaaccccgcgcaacaggcgttgcgcggggttttcttttgtcgagggagttgaccggtaagccgggttctgtcgtggacagtcattcctctaggccagcaatcgctcactggctcaagcagcctacccgggttcagtacgggccgtaccatgtgaacccctatttggccttgctccgggtggagtttaccgtgccacgaactgttgccagccgcgcggtgcgctcttaccgcaccctttcacccttacctgatcccgcttgcgcgggccatcggcggtttgctctctgttgcactagtcgtaggcttgcgcctcccaggcgttacctggcaccctgccctatggagcccggactttcctcccctccatctgtctccccgaagaggacggcaatgaagcggcgactgtctggtcaactccggcgcggatagtagcgtcgcggcggcggcaggtcaaccgctttacggctgttgttgctccagcgcgtgcttatacagcgcatttttcttcacgccgtggatttccgccgccagcgccgccgcctttttcaacggcagctctttttgcagcagcgccagcgtgcgcagcgcctcgagcggcaacgcatcctcctgcgccttgtggccttcgacgatcagcaccatctcaccgcggcggcgcacttcatcttcctgcacccacgccagcagctcgcccaccggcgcgccgtggatggattcccaggttttggtcagctcgcgcgccagcacgacatagcgctgcgggccccaaacggtgaccatgtcctgcaggctttccagcagacgatgggtggattcgtagaaaatcagcgtgcgcggttcctccgccagcgccatcagcgtatccttgcgccccttggttttcgccggcagaaaaccttcgtagcaaaaacggtcggaagcgacgcccgcggcgcacagcgcggtggtggcggcgcaggcgcccggcagcggcaccacgcgaatgccggcctcgcggcagcggcgcaccaggtgataaccgggatcgttgatcagcggcgtgccggcgtcggaaaccagcgcaatgctttggccttcctgcagtttcgccagcagctgctcggccttttgctgttcgttgtgatcgtgcagcgcgaacagacgcgcgttgatcgcgaagtgttgcaacagcaatccggtatggcgcgtatcttccgccgcgatcagatcaacgcttttcagtacctctaacgcacggtgggtaatatcgcccagattgccgataggggtgggcaccacatacagcgttgatgcagaaatgactgattgttggtgttgattcattgtttcatccgggttgccgatttaatattgagcatcttgaaaaaaacatcactggatacagtatgctttcctcaacattcgttcgtaccaaagcagggcgttccaagcctgtccgactgaccgcagtcatcgccgccgcccttttcctggcaggctgtccaagtcgggccccgcaaacgccgcccgccaatatacaggacgaagcgagcgccagctccgattactacctgcagcagttgcagcaaagcagcgatgataacaaggctgactggcaattacttgctattcgcgccttgctgcgtgaaggaaaactgccgcaggccggcgaccagttgaatcaactgccgaaaaatctcagcggcgcgcagcagaccgaacgccaattgctgaccgccgaactgcagatcgccaacaagagctacgtcagcgcccgcagcacgctgggccacctggacagcggcgcgctgtcgccgaatcagaaggtgcgctactaccaggcgcagatcgccgccaatcagggcaaagcatcgctgccgctgatccgcgcctatatcgcccaggagccgctgctgaccggcaaggcgcaccaggacaatctggatcaaacctggcaggcgctgctgcagctgacgccgcaggagatgaacagcctggtgatcaacgccgacgagaacgtgctgcaaggctggctggatctgctgcgcgtttatcaggacaacaagcaggatcccgatctgctgaaggccggcatcaaagactggcagaaccgttatccgaagaacccggcggccaaaacgctgccggctcgcctgaatcaggtgctgaacttcacccaggcctccacctcgaaaatcgccctgctgctgccgttgaacggccaggcgaaagtgttcgccgacgccatccagcaaggcttcgaagcggcgaaaaacggcggttccatgccggcgccgcagcctcaagccgcgcaaccggccagcacgccggctcaaacggcgcctgccgatcaggccgctacgggtgacatcaacgccaacggcgcggtcagcccttcggcccaagagagccagcctgccgtcaccgccgcgcaacccgctgcgccgtccagcgcgccgataacgccgctgcaggccgccaacgcgcaggtcaaagtgtacgacacaaccagccagccgctggccgccttgctgagccaggcgcagcaggatggcgccaccctggtggtcggcccactgctgaaagagaacgtcgatcagttgtccgccagcaccaccacgctgaacgtgctggcgcttaaccagccggaaacgccgaaggacaacctgaacatctgttacttcgccttgtcgccggaagatgaagcccgcgacgccgcccgccacatctgggaacagcagaagcgtcaaccgctgctgctggtgccgcgcggcgccttcggcgatcgcgtcgccagggcctttaaccaggaatggcagaagcaaggcgggcaaaccgtgctgcgccaggatatcggctccgccggcgagctgcgccaaatggtgaacagcggcggcatccgcatgaccggtacgccgatgtcgagcgccccggcgccgcagagcgtcaccatcgccgggctgaccattcctgcgccgccgagcgacgtgcccgccgccaccggcggcagcgtcgacgcggtgtacatcgtcgccacgcagtctcagctgacgctgatcaaaccgatgatcgacatggccaccagctcgcgcggcaagccggcgatgtacgccagctcgcgcagctaccaggccggcgccggcccggacttccgtctggaaatggaaggcctgcagttcagcgatattccgctgctggccggctcaaaccctcagctgctgcagcaggccagcgcgcgtttccgcaacgactactcgctggtgcgcctgtatgcgatggggatggatgcctggacattggccaaccactttgctgaaatgcgccagctgccgggcttccaggtttccggcaccaccggtacgttgagcgcgtcgccgaactgcgtgatcaaccgtaagctgccttggctgcaataccgtcagggcacggtcgttccagtctcttgaacccacgcgcctcaggggcgggctatgagttactggcccgccgtcacctggaacacgccgggctcaccttctgcgccgccaatgtcgcggtgcgcggcggtgagctcgacctcatcatgcgcgacggcaccacctgggtgttcgtcgaagtgcgctatcgccgcaacgacgccttcggcggcgcggccgccagcgtcacctttcgcaaacaacagcggttgctgcacgccgccgccgtctggctggcagggcgcggagccagttttgacacatcatcttgccgttttgatgttttggccattaccggtagccagttagaatggatacccaacgccttcaatgcggattaatcggggttttgcggcgcagaccggccctttgacttagtggattaatacaacgtgctggatagaattaaagtctgtttcaccgaaagcatccaaacccagatcgcggcggcggaagcactgccggacgccatttcccgcgctgcgatgacgctggttcaatccttactcaacggcaacaaaatcctgtgctgcggcaacggcacctcggcggccaacgcgcagcacttcgccgccagcatgatcaaccgttttgaaaccgagcgccccagcctgccggccatcgctctcaacgccgacaacgtggtgctgacggcaatcagcaacgatcggctgcacgacgaagtgtacgccaagcaggtgcgtgcgctcgggcacaccggcgacgtgctgctggcgatttccacccgcggcaatagccgtgatattgtgaaagcggtcgaggcggccgtgacgcgcgatatgaccatcgtcgcacttaccggctacgacggcggcgagctggccgggctgctcggccagcaggatgtcgaaatccgcatcccgtcgcaccgcagctcgcgcattcaggaaatgcatatgctgaccgtaaactgcctgtgcgacctgatagacaatacgttattcccccaccaggacgattaaggaactgagatgaagctaaaagccacatttgcagtgctgtccagcgccctgctgttgcaaggctgtatcgccggcgtcgtcgtcggcagtgcggccgtcgccaccaaaaccgccaccgacccgcgcagcgtagggacccaggtggatgacggcacgctggaagccagagtcgaaagcgccctgagcaaagaccagcagttgaagaaagatgcccgggtggtcgccaccgcctatcagggcaaggtgctgttgaccggccagtcgcctaacgccgatctcaccgcgcgcgccaagcagatcgccatgggcgtggaaggcacgaccgaagtgtataacgaaatccgtcagggcacgccggtcagcctgagcaccgcatcctccgacacctggatcaccaccaaggtgcgttcgcagctgctcaccagcgatacggtgaaatcgtccaacgtgaaggtcaccaccgaaaacggcgaagtgttcttgctgggcctggtcacgcagcaggaagggcagtcggcggcgcagatcgccagccaggtcagcggcgtgaagcacgtcactaccgcctttacctacgtaaaataatccgcctggcgggagcggcaccgtgccgttcccgcccgtttaatccagcttgttctcgcgtaaaaacgcttccccgcccagttgccgcatctgccgcatgatccactgttgacgctgcaccacatagccggacggcgcatcggccctgaagcgatgcggattcggcaataccgccgccagcagcgccgcttcggccgcgctcaggcgcttggccggcttatggaaaaagcgctgtgaagcctcttccacgccgaacaccccatcgccgaactcgacgatgttcaggtacaccgtcagaatgcgccgcttggtccacaccaattcgatgccggacgtcagcccggcctccaatcctttgcgcagccagctgcggccatcccacaaaaacaggttcttggcggtttgctgcgacagcgtggacgcgccacggatgcgcgtcgggcgcttctcattgtggctgagcgccttttcaatggccgccacgtcgaagccccaatggtctggaaacttctgatcttccgccgccatcaccgccagcgccatttgcggcgagatgtcgtccatcgacacccagtccgaatgggcgacatagccgaagtcgccgctcagccaggcgctgacctgccgttccaccatcacggcggaaaacggtaccggcaggaaggcgaagagcacaatgcccaacgcccacaggccgataatcgcgatgacgccgcgcttcagccaataccacgggcgcagccgccgccatccgacgagcgattttctcattcagccagttccagcacccgcgccaccagcttatcgatgcccagggccgcctgcgcgatagacggcgccagcatataggccggcgtggtcacgatcttatgttcgctgtccaccacgatgtcgtccaccgggcaaatcaccggttcgccgcccatggcgtcaatcacttcccccagatccggatcgttgccaatggtcagccgcgcttgttgatccagcagtttcggcaacagcgccggcgcgatgcacatcaggccaattggtttgttggccttatgcatctcgcgcgtcaggcgcgccaaatcttcatcgacccaacattccgcgccggcttcggcgaaattgctgaggttcttggcggcgccaaagccgccgggcacgatcagcgcatccagctgcgcggcctccgccagcgccagcggctgcaccgcaccgcgggcaatgcgcgccgattcaatcagaacattgcgcgactccgccatctcctcaccagataagtgattaataacatggcgttgtggtttatcaggcgccaagcacaccgcctgggcgccggcacgatccaacgccagcagcgtcagcaccgcttcatggatctccgtaccgtcataaacgccgctgccgctgaggactacacccacctttttcatcactcttactcctgtcgctgctgtcaactggttcgtgctcggagttgacaaacactaatctacatcacacattttaatgaatcttctaacaagagcgcttacatttgctatgttgttggctgtatgatgtttaggaattcgcaacaacctgctcgaccagaacactgaaaccaatacgcaggttcacaatttccctggtgttggcgcaatattcgcgcaccccggcttaggtcggggtcattttttttcagcgttctcaacccaagcccgcagtacctgcacgtcgttgcgccactcttgtttcagctcatccacccaatcctgcacgttatcccaccaggccggcagcgtcggcgtttgaatctgctgcgccagctgctgcagatggcgcagaccgaccgaaccggcggcgcccttgatcttatgcccttcctcagtgatgcctttctgatcgcgcgccgtcatgttggagtccagcaccgccagatagcccggcatcatctgttcgaacatctccagactttggtggatcagctgcgggccaaccagatccatgtactgttccagcatcgcggtatcgagtaacgactcattaatctgcatcgccttgtgctccgttttctttgaagtgtgagaaggttgatgatcccaatagtgtttgatgaccttggtcagcgccggcaccgacagcggtttgctcagcacatcgtccatgcccgcctcgagatactcttttttgtctttcagcacgttggcggtcagggccaccagcggcggcagcgcctgcccggcatagcgctcgcgcagcgcccgggcgatgtccagcccggtcatgtccggcagttggatgtccagcagcaccagatcgaactcgtccggatcgaacatcgccagcgcgtcgtggccgttcatcgccacgtcgacgctgttgcccagcttctccagcaccgagcgcgccacgatcacgttcagttcgatatcttccaccagcaggatgtgcagcgccggcaacggcagcgcctcttcctccggcgccgcgctgacggcttcctgcaccgccggcgccttgatggttaaggtaaagcaagaaccgtgcccttgttcgctgcgcacggtgatgtcgccgcccatgctctgcgccagccgcttggagaccgccagcccgatgccggtgccggtggccgggcggccgccgcgctgatctttcacctggtaatacatggcgaagatcttgtcctgctcgtcctgcgggatgcccatgcccgaatcttccacctcgaacaccagcttctcctgcgcctcgcgccgcacgcgcaccacaatttgcccctgctgggtaaatttcaccgcgttgccgatcagattccacaggatctgccgcaggcgggtgccgtcggtcacgatctgctgcggcagcggcgtctgcggctccatgacgaactgcagccctttcggctgcgccagcaggcccgagaggttctccaaatccgccaggaaaccggtgaagtccaccggctggttgtcgagctgcaccttgcgccgctcgagcttgtccatttcgataatgtcgttgaagatattgccgagggtgatggcgctgacgtggatggtcttcaggtatttcagctgctcgtcgttcagctcggtatcgagcagaatgcggctcaggccgacgatgccgttaagcggcgtacgcagctcgtggctgatagtggagataaaggtggtcttctccctgctggcgttctccagcgcgtcctggtagcgcttacgctcggtaatatcgcggccgaaacccatcagcccgtggcgtttgcccacccggtcgtaaaacggcaccttgcgcagctcgaaacaggccttgcggccatcgggatacaccagccactgttcgtaggtcagcgagacgttgtggcggaacaccttctcgtcggtttcgatcaccttttcggcgatttcctggccgtagacgtcgaacggcgtcaggccgatcaattgcttctcgctcttgccggtcaacagctccatcgcgcggttgcagccggaaaactctttgtcttcgttgcggtagtagaccagatccggcgaggcatcgaggaaggaacgcagcagcgccgattgctggcccagctcaatctgcgcctgctcgcgctgctccatctcttccgtcagcttttccatcacctgcaggcgctcttcttccgctttgatacggtcggcgatctcctgattcagctggctgatattgtctttgagctgctgattgagctccagatcgcggtggcgcatctcttccagcttgtccaccagccgcgccagccgctggcgcgactcttccaactgttccaccaccaccgagagaaaatagaccgcccacggggtgatcaacaggccgaagaagatcgaacgcaccacgtcgatgctttccacttcgccgcgcagcagcatggtcaccgccatctgcaccaccatcgccagcaccaccagcgccgaggccagcagcagcgagaagcgcaccaaccccagtttcaccattaaatcaacgtagtactgggccaacacccggatttgcttcatagcggctcccatcagacacaatcttttgaatcataccgtaaaacagcggtgagataaggcggcaaacgccgaagtgtggcaaagattgcacttcagagcggcatgccagggcggtagcgccacttttcatccagcgcgctgccctgcccgccgtgccgttgcagataagcgccgaccgcctgcatgccgctccagcggttttcgcaccacagcggcgccagcagcgtcggccggcgggcgctggcggaaaggcggtggtacaccacgtcccccggcgtatggcggatcatctccccggcactggcggcgtaatcctccagcgccagttcgggcaaccgcccggcctgccacgcccgcgccagggtgctgccggtgacgacgtgcagcgggtgcagcttgataccgtcgacgccggtctccgtcacccgctgcagcgtgagcagatgatcgcgctgggtttctcccggcagcccgacgatcagatggcagcacaccttcagcccgcgctgccgggccagccgcgcagtctgctgataacagcgaaaatcatggccgcggttgatgcgcttcagtgttttatcgtgcgccgtctgcagccccagctccagccacacctcatagccttgctcgcggtagcccgtcagcagatccagcgcggcggccggcacgcagtccggccgggtgccgacgcacaggccgaccatggcgctctgcgccaacgcctgccgatacatcgcctccagccgttcaacctccgcataggtgctggtataggcctggaaataggccagatagcgccgcgcccgatcgacccgcgcggcctgctgcgccagctgttcggcgatgctctgccgctgcatcgcctcatcggcgaacgaggcgacgttgcagaacgtacagccgccgcgccccaacgtgccgtcgcggttagggcagccgaatccgccgtgcagcgtgagtttatggatcttttcgccatagcggcgctggagatccgcgccaaacatattgactaattgcggcaactgcataatcttggtggttctctgtgttcaaagccgcgatgctaataagaaacggcttttcccgcgatgacagagatcaacgctttccccgcaaggcgccaccaggcataactattcatcataaatgcaaatcaattcactataattctgatgaattattctaatcgtcacgcaaccgttaacggcaatatgacaacacggtgaaaaatagtcataaacatcagcaaagcaatatcttatagaataaaactctggcattacccctcgcactagcatggtgcagagattaaggggttgcactatagtgagacagctcacacttctgagtggatcggcgttgccccatgatagtgcaaaaatgcattaaaacacttatttttcaaataaataaacatcatcaattcgataagaatctatcttaagcccacatttgacctgcgaattctttctcgctaagttggaagtccgctggaagctttctggacgggcaaacgtctcgtcatatttatgcagtaattgaagactccctcttaaaacaagtcctataccacttgtgagaccgtcacgagaggccattgatggagggcggaaaagcagattggcggggttaacttgctgattggacttctgcctgaaattgggaagccccctcgcagtaggttgtgagagtcacgcagagcctggggaggttcacgatatgttgtacgataaatcccaagagagggacaactgtggtttcggcctgatcgcccacatagaaggcgaacctagccacaaggtggtgcgcaccgccattcacgcgctggcccgcatgcagcaccgcggcgcgatcctcgccgacggcaagaccggcgacggctgcggcctgttgctgcaaaaacccgatcgcttcttccgcatggtggcggaagagcgcggctggcgtttggccaaaaactacgccgtcggcatgatgttcctcagccagaatgaagaggaagcgcgcctcagccgccgcatcgtggaagaagagctgcaaaacgaaacgctgtcgatcgtcggctggcgcgaagtgccgaccaacccggacgtgctgggtgaaatcgccctctcctccctgccgcgcatcgagcaaatcttcgttaacgccccggccggctggcgcccgcgcgatatggaacgccgcctgttcgtggcgcgccgccgcatcgagaaacgggtgcaggatgacagtttctacgtctgcagcttctccaacctggtgacgatctataaaggcctgtgcatgcctgcggatctgccgcgcttctatctcgatctggcggacctgcgcctggaatcggccatttgcctgttccaccagcgcttttccaccaacaccgtgccgcgctggccgctggctcagccgttccgctacctggcgcacaacggcgaaatcaacaccatcaccggcaaccgccagtgggcgcgcgcccgtacctataaattccaaacgccactgatcccggatctgcaggccgccgcgccgttcgtcaacgaaaccggctccgactccagctcgctggacaacatgctggagctgctgctggcgggcgggatggatctcatccgcgccatgcgcttgctggtgccgccggcctggcagaacaacccggacatggacggcgatctgcgcgccttcttcgacttcaactcgatgcacatggagccgtgggacggcccggccggcatcgtgatgtccgacggccgctacgccgcctgtaacctcgatcgcaacggcctgcgcccggcgcgctatgtgatcaccaaagacaagctgatcacctgcgcctccgaagtcggcatctgggattaccagccggatgaagtggtggaaaaaggccgcgtcggccccggcgagctgatggtgatcgacacccgcagcggccgcatcctgcactcggcggaaaccgacaacgatctgaaaagccgccatccgtataaagagtggatggagaaaaacgtcaaacgcctggtgccgttcgaagatctgccggacgatcaggtcggcagccgcgagctcgacgacgcgcagctcgaaacctaccagaaacagttcggctacagcagtgaagagctggatcaggtgatccgcgtgctgggcgaaattggccaggaagccaccggctcgatgggcgacgataccccgttcgccgtgctttccagccggccgcgaatcgtttacgactacttccgccagcagttcgcgcaggtcaccaacccgccgatcgatccgctacgcgaagcgcacgtcatgtcgctggccaccagcatcggccgtgaaatgaacgtgttctgcgaagccgaaggccaggcgcaccgcctgagcttcaaatcgccgatcctgctgtactccgatttcaaacagctcaccacgctggaaggcgaatactatcgcgccgagacgctcgatctgaccttcgacccgcaacagcaggatctggagcagaccattcgcgccctgtgcgacgaagcggaacgcaaggtgcgcgaaggcgcggtgctgttggtgctgtccgaccgcgccatcgcgcccggccgcctgccggtaccggccccaatggccgttggcgccgtgcaaacccggctggtggagaaaagcctgcgctgcgacgccaacctgatcgttgaaaccgccagcgcccgcgatccgcaccacttcgccgtgctgctcggcttcggcgcgaccgccatctacccgtatctggcctatgaaaccctggccaagctggtggacagccaggcgatcgacaagaaataccgcgacgtgatgctgaactaccgcaacggcatcaacaaaggcctgtacaagatcatgtccaaaatgggcatctcgaccatcgcctcttaccgctgttccaagctgttcgaagcggtcggcctgcaccgcgatctggcggatctgtgcttccagggcgtggtcagccgcatcggcggcgccagcttcagcgacttccagcaggatctgcagaacctctccaagcgcgcctggctgaaacgcaaaccgctggagcaaggcggcctgctgaagttcgtgcacggcggcgaataccatgcttacaacccggacgtggtgaactcgctgcaaaaagcggtgcacagcggcgagtacagcgactaccaggcctacgccaagctggtgaacgagcggccggtcgccatgctgcgcgatctgctggccatcacgccgaaaggcgaaccgatcccggtcgatcaggttgaaccggcggagtcgctgttcaaacgcttcgacaccgcggcgatgtcgatcggcgcgttgagcccggaagcgcacgagtcgctggcgatcgccatgaacggcctcggcggcttctccaactccggcgaaggcggcgaagatccggcgcgctaccgcaccaacaaggtgtcgcgcatcaaacaggtggcctccggccgcttcggcgtcacgccggcctacctggtgaacgccgacgtgatccagattaaggtggcgcaaggcgccaaaccgggcgaaggcggccagctgccgggcgacaaagtcaccccgtacatcgccagactgcgttactcggtgccgggcgtgacgttgatctccccgccgccgcaccacgacatctactcgatcgaagatctggcgcagctgatcttcgatctgaagcaggtcaacccgaaggcggtgatctcggtgaaactggtgtccgagccgggcgttggcaccatcgccaccggcgtggcgaaagcctatgccgatctgatcaccatcgccggttacgacggcggcaccggcgccagcccgctgtcctcggtgaaatatgccggctgcccatgggaactgggcctggtggaaacccagcaggcgctggtggccaacggcctgcgccacaagatccgcctgcaggtggacggcggcctgaaaaccggcgtggacatcgtcaaagcggcgatcctgggcgcggaaagcttcggcttcggcaccgggccgatggtggcgctgggctgcaaatacctgcgcatctgccacctcaacaactgcgcgaccggcgttgcgactcaggacgacaagctgcgccgcgatcactaccacggcctgccggaacgcgtgacgaattacttccagtttatcgcgcgtgagacccgcgagatcatggcccagctgggcgtgagccagctggtggatctgatcggccgcaccgagttcctgaccgagctggacggcatttccgccaagcagaacaagctggatctgtcgccgttgctgacaaccgccacgccgcatccgggcaaagcggtgtactgtaccgaaagcagcaacccggcgttcgacaagggtctgctgaacaaagagttgctggcgcaggcgcagccgtacatcgaagcgaagcaaggtaaaaccttctacttcgacattcgcaacaccgaccgctccgtgggcgccatgctgtccggcgcgatcgccaacgtacacggcgatcaggggatggcaggcgatccgatcaaggcgcacttctccggcaccgccgggcagagcttcggcgtctggaacgccggcggcgtcgagctgaccctgaccggcgacgccaacgactatgtcggcaaaggcatggccggcggcagcatcgcggtgcgcccgccgatcggttccgccttccgcagccatgaagccagcatcgtcggcaacacctgcctgtacggcgccaccggtggcaagctgttcgccgccggccgcgcgggcgaacgtttcgcggtgcgcaactccggcgccatcaccgtggtggaaggcatcggcgacaacggctgcgaatacatgaccggcggcatcgtctgcgtgctgggtaaaaccggcatcaacttcggcgccggcatgaccggcggcttcgcctacgtgctggacgaagacggcgagttccgcaagcgcgtgaacccggagctggtggaagtgctggatgtcgatcagctggcgatccatgaggagcacctgcgcggcctgatcaccgaacacgtgcaggcgaccggctcttcccgcgcggaagagatcctggccaactggccggagtgggcgccgaagttcgccctggtcaaaccgaagtccagcgatgtcaaagcgctgttgggtcaccgtagccgttccgcagccgagctgcgggtgcaggcgcagtaagaggtaggtcattaatgagccagaacgtttatcaatttatcgacctgcagcgtgttgatccgccaaagaaaccgctgaagatccgcaaaatcgagttcgtcgagatctatgaaccgttttcggaaacccaggccaaggcccaggcggaccgctgtctgtcctgcggcaacccgtactgcgagtggaagtgcccggtgcacaactacatcccgaactggctgaaactggccaatgaaggccgcatcatggaagcggcggacctggcgcatcagaccaacagcctgccggaagtgtgcggccgcgtatgcccgcaggatcgcctgtgcgaaggctcctgcaccctgaacgacgagttcggtgcggtcaccatcggcaatatcgagcgctacatcagcgataaggccatcgaaatgggctggaagccggacatgtcgcacgtgcagccgaccggcaagcgcgtggcgatcgtcggtgccggccccgccgggctggcctgcgccgacgtgctgacccgcaacggtgttaaggcggtcgtatacgatcgtcatcctgagatcggcggcctgctgaccttcggcatcccggctttcaagctggaaaaggaagtgatggtcaaacgccgcggcatcttcagcgagatgggcatcgagttccagttgaacaccgaagtgggtaaagacgtcagcatggagaccttgctgagcgagtacgatgcggtgttcctcggcgtcggcacctatcagtcgatgcgcggcggcctggagaatgaggaggcgcagggcgtgtacgacgcgctgccgttcctgatcgccaacaccaagcaactgatggggtatgaaaccgagcagcacgagccttacgtcagcatggaaggcaaacgggtggtggtgctgggcggcggcgataccgccatggactgcgtgcgtacctcggtgcgtcagggcgcaacgcaggtcatctgcgcctaccgccgcgacgaagccaacatgccgggctccaagcgcgaagtgaagaacgcccgggaagaaggggtggacttccagttcaacctgcagccgctgagcatcgaactgaacagcgccggccgcgtggccggagtgaaaatggtgcgcactcagctgggcgcgcccgatgccaacggccgtcagacggcagagcaggtgccaggttccgaacacgtgatcgacgcggacgcggtggtgatggcgttcggcttccgcccgcaccgcatggactggctggcggcgcacgacgtgcagctggataaacagggccgcatcctggcgccggaaggcagcgacaacgcgttccagaccagcaacccgaaaatcttcgccggtggtgacgctgtgcgcggatctgacctggtagtgacggcgatcgccgaaggccgcaaagcggcagacggcatcatgaactacctggaagtgtaaaccttccgtaccatcagaggcccggcatattgccgggcctctgtttttagtctgccacgctttgtaacaacctccccgctcctcaccgcctcaacgcgctatagtattgagttagcaccattgcggggcgcggctgcgcctgacaccgagataaggatagcgaacatgaaatgctccatttccctgttggccggcgcgctgctggccgtcaatttcagcgcttcagccatggcgctggattcgcaggaggttggttacaatatcgaagcgcgcggcgcacggccggtcgtggcgcagttgggcaaggccgggcagttcggcgccgtggaaaacagcatccggctgggggacgacagctggattgccctggcgcccaagttggccggcggcggcaatgccggctttaccgccggcatcaaatcggccctctccgcagccctgatctacaatccggcggcggtgttgcaggcgctcaacaaaggcaacgatctgccgctcaatgacatttgcaccgcaccgccggaagtgcaaggcgacaccgccatcagcagtttccgtgagcgcgcaacccacgccctgtctaccgtacgcgtaggcgatctcagcgcgccgcgcgacgcctgcattgccgcgttgaaaggctgacccgcgtctgccgggcaaaaaaaaaagcacccccatggggtgctttttcgtttgttctcacggggttatttcaccacgcgcagcgccgggcggccaccgcgcggcggctgcggcggttcgtcatccgggccgttgtcttccgcggtatccgggcgatcgccgtcgatcactgacatcagggtttccgaagggatcgtctcattgtccagaccttcgaacacgccttcgctctcgtcgtaggcggcttccggttcgaacatcgtgccggcgccgttttcacgcgcatagatcgccagcacggcggccatcggcaccgaaacctgacgcggcacgccgccgaagcgcgcgttgaactgcacgtcttcgttacccaacgccaggttgcctaccgcgcgcggcgcgatattcagcacgatctggccgtcacgcgcgaactccatcggcacctgcacgtccgggcgagtcacgtcgaccaccaggtgcggcgtcagttggttatccagcagccagtcgtagaacgcccgcagcagatacgggcgacgcggcgtcatctgagacatgtccatcgcgcttagccccgggtctgcaggcgcatttcacgttcggcttcggtcagggaagccaggaaggcgtcgcgttcgaagacgcgggtcatgtagcctttcagctctttggaaccggcaccgctcaattcgatgcccaactgcggcagacgccacaacaacggcgccaggtagcaatccaccaggctgaactcttcgctcatgaaatacggcgcctgaccgaagataggcgcgatcgccagcaactcttcgcgcagttggcgacgggcggattccgcttcctggccgctgctcttctcgatcttgtccatcagcgagtaccagttcttctcgatgcgcagcatcatcagacggctctcaccacgggcaaccgggtaaaccggcatcagcggcgggtgcgggaagcgctcatccaggtattccatgatgatgcgggattcatacagggtcagttcgcgatcgaccagcgtaggcaccgtctggtaagggttgaggtcaatcagatcttgcggcaggttatccatttcgacctgctcgatctcgacgctgacacctttctccgccagtacgatacgtacttgatggctaaaaatgtcggtcgggccagagaacagcgtcattaccgaacgtttgttggcagcgacagccatgaaaacctccaagttatctagaaaatactgcgaatagccaactgacaggctgctatcctgaataatcttgccgcaggccggcagcacgcagcgcgacccgagcccataaaaaaccggcccaggaggtcaactgcacggcgaacaggcgcaaaagtggatgatagtttaccagattctgcttgttttgtgggggcggtgcggcgaattcatgttgaattgtctgatatgccacagattttagtcggggacggcggatttcaggcgtaaaaaaacccggtgaagcaccgggttttttgcgtaaatcgcactgccgaagcagcgaaaattaacgcttggagaactgcggacgacgacgtgctttacgcagaccgactttcttacgttcaacctgacgagcgtcacgggtgacgaagccagctttacgcagttcagaacgcagagtctcatcgtattccatcagtgcacgggtgataccgtgacggatagcgccagcttgaccggagataccaccacctttaacggtgatgtacaggtccagtttgccaaccatgtcgaccagttccagcggctgacgaactaccatgcgggcagtttcgcgaccgaagtactgttccaggctgcgctggttgataacgatgttaccgttgcccggcttgatgaagacgcgagcggcggagcttttgcggcgaccagtgccgtagtattgattttcagccattgccattaatcccgattaaatgtccagaacttgcggttgctgtgccgcgtgattgtgctcggtgcccgcgtaaactttcagtttacggaacatagcacgacccagcgggccctttggcagcatgcctttaaccgcgatttcaatcacgcgctcaggacggcgggcaatcatctcttcaaaggtcgcttgcttgataccaccgatgtggccggtgtggtggtagtacactttgtctgtacgcttgttgccggttacagcaactttgtcagcgttcagaacgatgatgtaatcaccggtatccacgtgcggggtgtattccgctttatgcttgccgcgcaggcgacgagccagttcagtagcgagacggcctaaagttttaccatctgcatcaacaacgtaccagtcgcgttttacggtttctggtttagctgtaaaagttttcattagaaagcttacccaataattagttacacgttggtgaacacccaaacgctcgaaaacagttgaggttcacacgaccatacaagtccagcaaacctaccccttcgaatagccattgccggcactataaagtttttgggaaaaaaaactttgttgtaacgtggggtcgcaagattatagagaagtcgctcacaaagatcgaacggtttttgaatggaaaataaatttatcgccggcggcggacaaccggcgataggcccggcgggctcagggcagatgcggcagcttgaggtactcttcgctctgcatttcctgcaggcgcgacaggcagcgctggaattcaaatttcagctgcaccccctgatagatctcgaacatcgacgcttcggcgccgatcaccagcttgatgtgacgctcgtaaaattcatccaccagcgccaggaaacggcgcgcggtattctctttcagcggccccatcacctgcacattatacaggatcacgctgtgatacagccgcgacagcgcgatgtagtccagctggctgcgcgcctcttcgcacagcgtgtggaaatccaccgccagcacgccgtccaccgaacggatcgcctgcagcggccgatggttgatctgcagcaccggcgcgtcctcccccgccttgcccgccagcttgacgaacatccgatccagcgcctcacgcgtctggtcgtttagcggtgtcaggtagaggtgcgcctgggtcagggtgcgcagacgatagtcgatgccggcgtcgacgttcattacgtcgcagtactcgttgatcagatcgatggccggcaggaaacgcgcccgctgcagaccgttgcggtacagatcgtccggcgggatgttcgaggtggccaccagcgtgatgccgcgcgcgaatagcgcctgcagcagcgtggccagcagcatggcgtcggtgatgtcggagacgaagaattcgtcgaagcacaatacgtcggtctcggccttaaagccgtcggcgacgatttccagcgggttttcccgcccctgcaactcggtcagctcttcatgcacccgcagcatgaagcggtggaagtgcagacgcattttgcgatcgcccggcaaactgtggaagaacatatccatcaaccaggttttgccgcgcccgacgccgccccacatatacagcccctgcaccgggcgctgcggcgccgtgtcgccgcccttgcccagcaagcggctgagcttgccgcgcagcccgccggcaggcgcgttcgccgccggcttttgccgcagagcctgataaatgcgatccagttgagtgacggcccggcgttgaacctcatcggcctgatattcccccgcatccagcgcctgctggtagcgagataacggtgatagtgcctgcatctgttcgatgttccctaagaacgcttagaaattatttagccaacgttggcggcaagttgatgccgattcgcaccgttatcgccacaaatgcccgctgcgggcgccgctgaaaaccctgtaaaaattaggtggaagcgcatcaggattccactcggacaaggttaacggttatagtggatattattaagtgaaaaatccctgcggaacaacgaagtcaaaataggagtcatcatgacctgggagtatgcgctgattggtttggtcgtcggtatcgtgattggtgcggtggcgatgcgttttggcaaccgtaaattgcgtcaacaacaagtcttgcagaatgagctggacaagagcaaaaccgagctggaagagtaccgtcaggagctggtcggccacttcgcccgcagcgccgagctgctggataacatggcgcgcgattatcgccagctgtatcagcacatggcgaaaagctccaacaacctgctgccggatctgccgatgcaggagaacccgttccgctatcgcctgaccgaagcggaagcggacaacgatcaggcgccggtggaaatgccgcgcgactattcggaaggggcctccggcctgctgcgcggtcaaagcgcacgccgcgactgatattccttcttcgcccgcggggcctcccgcgggtttaatcccgtttgtgccatattgaccttccttcgcattacctttactgaactttgcacgcaaattcacggtcttacccttcactatgacaaggcgattgccttatcatcaaattttcatcggcaggtattgagagagttatcatcaatgaagaaaaagtcgttaattcttagtgcattggcaatgagcctcggtctggcgctcagcgccgcaccggcggccaacgcggccctgcccgtcgccgtgcaggggcagccgctgccaagcctggcgccgatgctggaaaaagtcttgcccgccgtcgtgagcgtgcatgtcgccggcacccaggtgcagcgtcaacagttgccggaagagttcagacgcttcttcggccccaacttccccggccaacagcagagctcccgcccgtttgaagggttgggctccggcgtgatcatcgacgccgccaagggctacgtgctgaccaacaaccacgtcatcaacaacgccgataaaatccgcgtgcagttgaacgacggccgtgagctggacgccaagctggtcgggcgcgatgaacagtccgacatcgccctgctgcagctcagcgataccaaaaacctgaccgccatcaagatggccgattccgaccagctgcgcgtcggcgacttcgccgtggcggtcggcaacccgttcggcctgggccaaaccgccacctccggcatcatctcggcgctgggccgcaccggcctgaatctggaagggctggaaaacttcattcagaccgacgcctccatcaaccgcggcaactccggtggcgcgctggttaacctgaacggcgaactgatcggcatcaataccgccattctggcgccgagcggcggcaacgtcggcatcggcttcgccattccgagcaatatggcgcagaacctgagccagcagctgatcgaattcggcgaagtgaaacgcggcctgcttggcatcaagggcagtgaaatgaccccggacatggccaaagccttcaacaccgacgcgcagcgcggcgccttcgtcagcgaagtgttgccgaaatccgccgccgccaaggccggcatcaaagccggggatattctggtttccgtcgacggcaaaccggtgaacagctttgccgaactgcgcgccaaggtcggcaccaccgcaccgggcaaaaccctcaaggtaggcctgctgcgcgacggtaaaccgcaggaagtctcggtcacgctggacaacagcgagagcgcctcgaccaacgccgaaacgctgtcgccggcgctgcagggggtatccctcagcaacggcgcgctgccgagcggcgacaagggcgtgaaggtggagaacgtggataaaggctcgacggcggcgcaaatcggcctgcaaaaaggcgacgtgatcatcggcgtcaaccgccagcgcgtggacagtatcaccgcgctgcgcaaggtgctggaagccaagccgccagtgatggcgctcaatatcgtgcgcggtaacgaaaccatttatctgctgctgcgttaatttgtgcaaaaaccgggctcggtgacatactgcgcccggttaactcatgctatcctccgaacatcgttcaccacaccacgaaaactccatgtttgctaagctcttgcgttctgtcgttatcggtctcatcgttgccggcctgctgttggccgccctgcccatgctgcgctcttccaacggcctgtttgcagagaaaaccgagaataccagcgacgaaacgccggtgagctacaacaaggcggtgcgccgcgccgcccctgccgtggtgaacatctacaaccgtaacctgaacggcgccgccaacgtgctgtcgctcggttccggcgtgatcatgaacgaacgcggctatatcatcaccaaccgccacgtgatcaaagacgctcagcagatcaccgtggtcttgcaggatggccgccgctatgaagcgctgctggtcggctccgacggcctgaccgacctggcggtgctgaagatcgatcccggcaacctgccggtgatcccgaccaataaaaatcgcgttgcccacgtcggcgacgtggtgctggcgatcggcaacccctataacctggggcaaaccgtgactcagggtatcctcagcgctaccgggcgcatcagtatgagcaccactggccggcagacgttcctgcagaccgacgcctcaatcaaccgcggcaactccggcggcgcgctggtcaactcgctgggtgagctgatcggtatcaacaccctgacctatgacaaaatcaccgacggcgaaacgccggaaggactgggctttgcgatcccgatcgaactggctaccaagatcatggacaagctgatccgcgacggccgcgttatccgcggctatttcggcattcagggcaaggagatcattccgctgcgcccctccaattccggcatcgatcgcctgcagggcatcatcgtgaccgaaattacgccgaacggcccggcgagcaacgccggtttccagatcaacgacatcatcatcaacgtggataacaaaccggcggtatccgtgctggaaaccatggaccaggtggcggagatcaggccgggcaccgagataccggttatcgtgctgcgcgacggcaaacgcattacgttgaaaatgacggtgggtgaattcccggaagacagcaattaaaaaagggccggcattgatagccggccctttgctattcatcctgccgacgcagccgcgccggcgctaatgacttactcgcctttcacgcgctcgatgttcgcacccagcgcgcgcagcttgtcttcaatacgctcatagccgcgatcgatgtgatagatgcgatcgacaacggtcacaccgtcggcgatgcagccggcgatcaccaggctggcggaagcgcgcagatcggtcgccatcacctgagcgccggacagctgttcaacgccatggcagatcacggtgttgctctcgatctccgcgtgtgcgcccatgcggatcagttccggcacgtgcatgaagcggttttcgaagatggtctcggtgatgacgccagtgccttccgccaccaggttcagcaggctgaactgagcctgcatgtcggtcgggaagcccgggtgcggcgcggtgcgcacggtgaccgctttcgggcgcttgccgtgcatgtccaggctgatccagtcttcgcccacttcgatatcggcaccggcttcgcgcagcttggccagcaccgcatccagcgtgtccggacgggtgttgcggcacatcactttgccgccggaaaccgcggcggcgatcaggaaggtgccggtctcgatgcggtcaggcagcacgcggtacacgccgccgcccagacgctcgacgccctcgatggtgatcttgtcgctgcctgcgccgctgatcttcgcgcccagcgtgttgaggaagttggcggtatcgacaatttccggctcacgcgcggcgttttcgataacggtggtgccggtcgccagggtcgcggcgctcatgatggtcacggtcgcgcccacgctcaccttgtccatgacgatgtgcgcgcccttcaggcggccctcgacggacgccttgacgtagccttcttccagcttgatctcggcacccaactgctccaggccggtgatgtgcagatcgaccggacgcgcgccaatcgcgcagccgcccggcagggaaacctgaccgcggccgaaacgcgccaccagcggccccagcgcccaaatggaagcgcgcatggttttcaccagatcgtaaggggcgcaaaactcgttcacgccgctggcgtccacgaagaccgaaccgttgcgctcaatcttggtacccaactggttgagtagtttaatggtggtgtcgatgtccttcagcttagggacattctgcagctcgaccggctcttccgccaacagggcggcgaacaggatcggcagggcggcgtttttggccccggaaatagacacttcaccgctcaggcgggtccgaccctgcacacgaaatttatccatctgactactctctgttatctaatctgaagctgcccgcccggcagggcaaacagccttaaaatccgttgagtttgcggtctcgctgccactcttcaggggtgtacgccttaatagacaaggcatgaatgcggttgtccgcaatgtattccatcagcggtgcgtaaaccgtctgctgttttttgacgcggctcatgccggcgaacagttcaccgaccacgatcgcctgaaaatggctaccgtcgcccgtcacatgtacttcatccagtgccaatgcctgcatcagcacgtctttaatctcgttggtttccatagtatccagttctgccgctaaaggatcataaacagcctagtatcttagtggaatacgatgttttcttaaactaaagaaaaagcccctgcataacaggggctttgtatcgttttaccacgcaagagcggcctaaaacaccgctaaccggcggtatcgacaggcattatcgcctgcaggttgtagagcgcgatcagcgttttcaggcgctcggtagcgccgaaaattttcagcgctacgccgcgttggcgctgctcttcctgcagatgcagcaacagcgccagcccggcggagtccacgcgctgcagttgcgccacgtcgatcgcggttttatccgccatcagcgcggcgcgctgccgccacagcggctgcagcgtttcccggtccagttcaccgcgcaggatcagcgtctgccgctctgattcgaagctgagcgctgccgacatcagtttttcttgtccagcgtgataggctgcgcggcggcggcctgcagctgcttggtcaggccgtcgatgccctgagtacgcagcgtagacgcccactcattttgcttggtggtgatcatgctgacgccttcggcgatcatgtcatacgcctgccagtagccggttttgctgttcttgcgccattggaaatccagacgcaccggcgggcggccgccgttgtcgatgatggtgacgcgaatagccacgatgtcggcattgcccagcggctgttcaggcgcgatctggtaagtctggccgtgatacatcgccagcgcctggccgtaagcctgctccaggtaagcctggaaggcggtgaagtaagcttcgcgctgcgcaggcgttgcctctttgtagtaacgccccagcaccagcgcgccggcgtatttcacctgcacgaacggcatcagttcctgatgcacgatggcacgcaggtagttcgggtcctgcttgatcttcggctgttcgttcttcaaacggctgaaagtcttctgcgccgcttcttgcatcatgctgtagggattggtttggtcggctgcgctcgccagcggtgcaaccaccagcagagccaccatcagtaaacgtttaaacatgcaggtatcctctcttaatgatttggaacagcgggttgcggtgcggcgccggcagccggctcagcggccgcgtctcccgatttggcgctgtcctgaccgccgcttttatacaggaactggccgatcaggtcttccagaaccatggctgatttggtgtcctgaatggtgccgccatctttcaggatggtggtgcccatatcaggatcttcaaagcccacgttaagcgccagatattgctcgcccagcaggccggaggtgcggatcgccagcgaactggtatccgggatttggtcgtactttttctggatatccagcgccacgcgcggcgtgtaggttttcgaatcgagttcgatgtccgccacgcggccgatcaccacgccgccaattttcaccggcgaacgcggtttcaggccgccgatgttgtcgaacgtcgcgtaaatgcggtaggtcggctcgctgccgatcgatttaaggttcgccacctgcaggcagataaacacgatggcgcacagcgcgatcagcataaatgccccaacccagatttcactcttcttcgtttgcatcgaatcaattcccaaacatcagtgcggtcagcacgaaatccaatcccaacaccgccagtgacgaatgcaccacggtacgcgtcgtcgcccggctaatcccttcagaggtaggcacggcgtcgtacccattgaaaatggcaatccaggttacggtaatggcgaataccacgcttttgatcaggcagttgagcagatcttttttccactccacggcgccctgcatcgccgaccagaagaagccgctgtcgatgcccttccaatccacgccgaccaccgaaccgccccaaatgccgatcgccacgaagatgatggtcagcagcggcatgctgataagtccggcccagaagcgcggtgccacgatgcgccgcagcggatcgaccgccatcatttccaggctggagatctgctccgtcgccttcatcaggccgatttccgccgtgagcgcggaaccggcgcggccggcaaacagcagcgccgtgaccaccggccccagctcgcgcagcagcgacagcgccaccatcatgccaaggctggcctcggcgctgtaggtggtgagcacgatatagccctgcaggcccagcaccatgccgataaacagcccggagaccatgatgatcagcagcgactgcacgccgacgctgtaaagctgtttcaacaatagcggccactgcttgccgggttccggccggccaatcaacgcgttgaacagcatcaacccggcgcggccgaagctggcgctggtgttgatgccactgcgccccaacgacgctaacgctcttaataacatgagcttatttactccctaagcctagcagttcggtctgataatccccggccggatagcggaacggcaccggcccatccgctataccatccaggaactggcgcacgcgcgcatcaggattgttctgcaattgctgcgtggtgccttcggcgatcacccggttgtcggccacgatgtaggcgtagtcggcgatgctcagcacctccggcacgtcgtgcgacaccacgatgcaggtaatgcccagcgcatggttcaactcgtcgatcagcttgaccagcacccccatggtgatcggatcctggccaacgaagggttcgtcgaacatgatcatttccgggtccagcgcgatcgctcgcgccaacgccgcccggcgcgccatgccgccggaaagctcattgggcatcagttgggccgcgccgcgcagccccaccgcttccagcttcatcagcaccgtgctgtgcaacaaaggctccggcaggttgctgtgctcgcgcagcgggtaggccacgttttcgaatacggtcaaatcggtaaacagcgcgcccgactggaacagcatgctcatctttttgcgcgcgtcgtataactgacgccgggacaacgcgggaatgttgtcgccgtcgaaccaaatctccccgctgtccggcgccagctggccgccgatcaggcgcagcagcgtggttttgccgatgcctgatggccccatgatcgccgtgaccttaccgcggggcaccgtcaggttgatgtcttcaaatatccgtcggtcgccgcgcgagaagctcatgtcgcgtacttcgaccaaattatctgccttttggagcatgttaatggaccctttacgactcatcttttgctgaatctacccgtgatgttaaagcaatgggcgcaatccgtctcatctttacaaaaacttactgccatttcgcaaccaatggtgccattggttttacttttccgcgccacccggtcaaaattggcgccataacgaaaaaaaacgaaactgttcaactattagccggggaaaaccgttgctgcggctcaaacgcgcgcaacggagggcaagcaataccgccgcattgacggctttaaccaacgaaccgggataatacccgacaaaggaccctgcatgtttctcgcgatagcattattaatcgttggtttatttctactggtgtacggtgcagaccgcttagtttatggtgctgccgtgatttcccgctcgctcggcgtaccgccgctgatcatcggcatgaccatcgtcggcatcggcacctcgctgccggagctgatcgtgtctaccaccgccgcgctgaacgggcagatagatatggccgttggcaacgtattaggttccaacatcaccaacattttattgattctgggcgtggcggcgctgattcacccgctggccgcgcgctctgagatactgcggcgcgaactgccgctgatgttagcggtcacagtattatgcggtttcgtgttgatggacggcaccctgagcaggctggacggcgtgctgctgctggccgccgccgccggcttcatcctactgatgctgaaaatcgcccggctggcgcagcgcgagggcagcgacagcctgaccatggagcagatcgccgagctgccgcaggacagcagcaataccgtggcggtgctgtggctggtgctggcgtttatcattctgccgctctcttccagaatggtggtcgataacgcgacggtgatcgcgcactatttcggtctgagcgaactggtggtcggtttgaccattatcgccatcggcaccagcctgcccgaactggccacctccatcgccggggcgctcaagggcgaggatgatatggcgattggcaatatcatcggctccaatattttcaacacggtgatcgtgctgggcgtacccgccctgctgtcgccgggcagcgttgacaccgccgccttccatcgcgattactgggtgatgctggcggccagcgtgctgctgagcgtgctgtgcatcggccgcaaacatcgcatcggccacctggcgggcgcgctgttattatgcggctttattgcgtatcttgcggtgctgttctttaaccctttcagtactttcggctaaaccgacgggaatgagtatgtcgaacattgagttgcaaccgggcttcgattttcaacaggccggcaaagaagtgcttcagatagagcgtgaagggctggctcagctcgacagctacatcaacgcagacttcacccgcgcctgcgaaaccatcgccgcctgcggcggcaaagtggtggtgatgggcatgggcaaatccggccacatcggctgcaagatcgccgcgaccttcgccagcaccggcacgccctcattcttcgttcatccggcggaggccagccatggcgatttgggcatggtcaccccgcaggacatcgtgctcgccatctccaactccggcgagtccagcgagatcctggcgctgatcccggtgttgaaacgccaacagatcaccctcatctgtatgactaacaatccggaaagctcgatgggtaaagcggcggatatccacctgtgcatcaaggtgccgcaggaagcctgcccgctggggctggcgccgaccaccagcaccaccgccacgctggtgatgggcgatgcgctggccgtcgcgctgctgaaagcgcgcggtttcacgccggaagatttcgcgctgtcgcatccgggcggcgcactcggccgcaaactgctgctgcgggttagcgatatcatgcacagcggcgatgaaattccccacgtcagcgccgacgcctcgttgcgcgacgcgttgctggaaatcacccgcaaaaatctgggcctgacggtgatctgcgacgatctgatgaaaatcgccggcatctttaccgatggcgacctgcgccgggtgttcgacatgggcatcaacctgcacgaggcgaagattgccgatgtcatgacgccgggcggcgtgcgggtgcgccccaacatcctggcggtcgatgcattgaacctgatgcaacaacgccacatcaccgcgctgctggttgccgatggcgaccagttgctgggtgtggtacatatgcatgacatgctgcgcgccggcgtcgtttaattaaggaatagaacggaatgggtatggtagaaacctgctacgggccggtagaacaagaggttatggcgcgtgccgggaacatccgcctgttgatttgcgacgttgacggcgtgctgtcagacggcctgatcttcatgggcaacaacggtgaagaactgaaggcgttcaacgtgcgcgacggctacggcatccgctgcttgaaaacctcagacatcgaggtggcgatcatcaccgggcgctccgccaggctgctggaggaccgcgcgcagacgctcggcatcacccatctgtatcaggggcagtccgataagcttttggccttccgcgaactgttggataaactgtcgttaacggcggatcaggtcgcctatatcggcgatgacctgatcgactggccggtgatggcgcaggtcggcctggcggtcgcggtggcggacgcccatccgctgctgacgccgcgcgcccactacatcacccgcattgccggcggccgcggcgcggtacgcgaactgtgcgacatcattcttttggctcaaaataagctggaggacgccaaagggctgtcgatatgagtaaaaccaaactgtggatcaccatcctgttgacggtgatcgttctggcgctgatcggctggaacatgacggacttcagcgacgacacggcccctggcccggtcaacgatcaggatccgacctaccagagccagcacacggtcaccgtggtgtacaacccggccggtaaactgaattataagctggtggcggaagacgcgaagtattacaccgccggcgagctgagctggttcacccagccggtgatgacgctgttcgatgagaatgcggtggccacctggtcagttcgcgccgatcgcgccaaactgactaaagaccgaatgctgtatctgtatggtcacgtcgaggtgaacagcctgaccaccacctcgcagctggaaaaaattaagacggacaacgctcaggtaaacctggtcacccaggacgtcacctccgatgacgaagtcacgctttacgggaccaattttacctctaacggcatgaaaatgcgtgggaacctgcggaccaaaaccgctgagctgattgataaggttaagaccaactatgaaattcagaaccaaaaaccaactccgtaacctgttgctcggcagcttagttttggccgccagcgcccccgctctggcgctgaaatccgactccagccagccggtcagcatcgactcgctcaagcagtcgttggacatgcaaagcaacgtcagcaccttcaccgacaacgtggtgatcaaacagggcaccatcgatattcgcgccgacaaggtggtagtcacccgcccgggcggagatcagaataagacctatattgaagcgttcggcaacccggtaaccttctaccagatgcaggacagcggcaagccggtcaaaggccacgcgcagaaagtgcgttacgacgtggcgacccagctggtgaccctgacgggcaacgcctatctggagcagctcgacagcaacgtgaaaggcgatcgcatcacctatctggtgcaacagcagcaaatgcaggcgtttagcgataaaggcaaacgcgtgacaacggttctggtaccgtcgcagttgcaagacaaaaacgagcaaaaaaagagtaactaatcacttatggcaacactcatcgcagaaaacctggcgaaagcctacaagggccgtaaagttgtcgaagacgtcagcctgaaagtgaaatccggcgagatcgtcggcctgctcggcccgaacggcgccggtaaaaccaccaccttctacatggtggtcggcatcgtgccgcgcgacgccgggcgcatcgtgatcgacgaagaagacatcagcctgctgccgctgcacgcccgcgcgcgccgcggtattggttacctgccgcaggaagcgtcgatcttccgccgcctgagcgtgtacgacaacctgatggcggtgctggagatccgtcccgacctcaccagcgaacagcgcgaagaccgtgccaaggagctgatggaagagttccatatctcccatctgcgcgacagccttggccaggcgttgtccggcggtgaacgccgccgcgtcgaaatcgcccgcgcgctggcggccaacccgaaattcattctgctggacgaacccttcgccggggtggatccgatttccgttatcgacatcaaaaaaatcatcgagcacctgcgtgacagcggcctgggcgtgctgatcaccgaccacaacgtgcgcgagacgctggacgtatgtgaacgcgcctacatcgtcagccagggcaaactgattgcccacggcacgccggatgctattctggccgacgagcaggttaaacgcgtttatctgggcgaagagttccgcctctaagcgccggcgcgccctgcggggcgacaccgttaacggaagtagacagaaaactatgaagcaaggtttgcaactcaggctcagtcaacagctggccatgactcctcagctccagcaggcgatccgcctgctgcagttgtccacgcttgagcttcagcaagagatccagctggcgctggagagcaatccgctgcttgaacagaccgatctgcacgacgaaatcgacgccaaagaaacccaggagaccgaggggctcgatacccgcgaggcgctggaacagaaagacatgccggaagagctgccgctggacgccacctgggatgagatctacaccgccggcacgccgtccggcaccggcaccgactacagcgacgacgagctgccggtctatcagggcgagaccacccaaacgctgcaggattacctgatgtggcaggtggatctgacgccgttttccgataccgacgccgccatcgccacctccatcgtcgacgcggtggacgacaccggctatctcaccgtgccgctggaagacattctggaaagcctgggcgacgaaaacgtgaccctcgaggaagtcgaggcggtgttgaagcgcgtgcagcgtttcgatccgatcggcgtcgccgcgcgcgatctgcgcgattgcctgctggtgcagctctcccaatacgccaaagacaccccttacctggccgaagcgcggctgatcatcagcgagcatctggatctgctggccaaccacgactttcgcagcctgatgcgatcaacccggctaaaagaagatacactgaaagaagcgatgctgctgattcagtcgctcgatccgcgcccggggcagtcgatcaataccggcgaatcggaatacgtgattccggacgtgctggtgcgcaagacgcagaacaaatggacggtcgagctcaacggcgacagcgtgccgcgtttgaagatcaatcagcaatacgccgcgctgggcaacagcgcccgcagcgaagccgacggccagttcatccgcagcaacctgcaggaagccaagtggctgattaaaagcctggagagccgcaatgagacgctgctgaaggtcacccgctgcatcgtcgatcaacagcaggcgttcttcgagcaaggcgaagagtttatgaaacccatggtgctggcggatatcgcccaggccgtggagatgcatgaatcgacgatctcgcgcgtcaccacgcagaagtttctgcacagcccgcgcggcattttcgaattgaaatatttcttctccagccacgtgaataccgacagcggcggcgaagcctcctcgacggcgatccgcgcgttggtgaagaaattgattgcggcggaaaaccccgccaaaccactcagcgacagcaagctggccaccctgctcgccgatcaggggatcatcgtggcgaggcgcaccgtcgccaagtaccgagagtctttgtccatcccgccgtcgaaccagcgtaaacagttggtttgacctctattgagaaggaagacactatgcagctcaacattaccggacaccacatcgaaatcaccgatccgttgcgcgagttcgtgaacaacaagttcgccaaactcgaacagtattttgatcgcatcaatcaggtgtatgttgtattaagtgtggaaaaagtgcagcaaattgcggaagcaacggtgcacgtgaatggaggcgagttgcacgccacctcggaagacgagaatatgtatgccgcaattgatacgctgatcgacaaattggcacgtcaattgaacaaacataaagacaaattgaagcaacactgacaccctaacccattccatgaggcggcatccgtcgccgcctcacccttcggcgcgtgacccgcatgggtgacgcgccgaacggtaatcagggttaaaaccgacgaaaaaccgccttgccgggttcgcccggcggcgcggttttaagtgaagatgagatgaacaacgaatatatgcaattaagctcggtgttaaacatcgagtgcaccaaaagctcggtacactgcaccagcaagaagcgggctttggaaattatcagcgaactggccgccaaacagctcaatctgccttcgcaggtggtgtttgacgcggttctcacccgggagcgcatgggcagcaccggtatcggcaacggtatcgccattccccacggcaaactggaagaggacacactgcgggccgttggcgtgtttatccgtctcgaccaacccatcgctttcgacgctatcgacaaccagccggtcgacctgctgttcgcgctgctggtgcctgccgatcagtgcaaaacccatttgcatacgctgtcgctggtcgccaaacgcctggccgacaaaaccgtatgccgccgcctgcgcgccgcgcagagcgacgaagaactttaccaaatcatcaccgagtgatgcccggccggcgtgacttccagcccggataacgatactgttttatgatgatggatccggccacggccggaataacaaagtttaacggtggcgatgaacgccgccgcgatgccaggggagttgccacatggtgctgatgattgtcagcggccgttccggttccggaaaatccgtcgccttgcgggcgctggaagacatgggtttttactgcgttgacaacctgccggtagtgctgctgccgcagctcgccaatacgctggcggaacgcaatatctccgcagcagtcagcatcgacgtgcgcaacatgcctgaatcaccggaagtgttcgaatacgcgatgactcagctgccggacagcttctcgccgcagttgctgttcctcgacgccgatcgcaacacgctgatccgccgttacagcgacacccgccgcctgcacccgctctccagcaaaaacctgtcgctggaaagcgccatcgacgaagagagcgatctgctcgaaccgctgcgctcgcgggcggacctgattatcgacacctcggaaatgtcggtgcacgaactggccgaaatgctgcgcacccgcctgctgggcaagcgcgagcgcgaactgaccatggtgttcgaatccttcggcttcaaacacggtatcccgatcgacgccgactacgtgttcgacgtgcgcttcctgccgaacccgcactgggatccgaagctgcggccgatgaccggcctggacaaaccggtggcgtcgttcctcgatcgccataccgaagtgcacaacttcatctaccagacccgcagctatctggaacagtggctgccgatgctggaaaccaacaaccgcagctacctgacggtcgccatcggctgtaccggcggcaagcaccgttcggtgtacgtggcggaacagctggccgattacttccgctcgcgcggcaagaacgtgcagtcgcgccaccgcacgctggaaaagcgcaaacaatgacggtcaaacagacggttgaaatcaaaaacaagctgggcatgcacgcgcgcccggcgatgaaactgttcgaactggtgcaaagcttcgacgccgaggtgatgctgcgcaacgaaagcggcaccgaggccgaagccagcagcgtcatcgcgctgctgatgctggactccgcccagggccggcatatcgaagtcgaagcgaccggccctgacgaagtcaacgcgctggcggcggtggtcgagctgttcaactccgggtttgatgaagattagtcgctgagactctccccatgcgtcgcctcggcgcatgtgttgcctccccccctcccataacgtagccctcccgtttctcactttgcgaatccgcttccagaatcagccgtaaccgcctgtaaattcacgtcatggatttacccccaccacgataatcgcaatagtgtgtaacgcaaaaacagacaacaggcgggtgtttccccacgctttgcttacgggacaacgaaaagtttacaatttgtgaacttcaccggcagtcgctataatgttcaccgggtaggaatcgaaggaacgatgcatatcatttccagggaaccgttcaataacgcaacgaagcaatatcccaatgaagccactgctctcgaggccatttataaagcattgcgacggggcgagttccgcacgccggacgagttaaaagcgctttttccttcgctcgatcgtatgaaatacaaagagaaatggtgggtcattgacgtcggcggcaaccacctgcggatcttgttctttgccagcttcgagacacagaaagtcttcataaagcatatcgttagccacgccgaatacgacaagctgatgcagcactatcgaaggagttcatcatgattacagatgccattaaggcggccgatgcgctactgcgcgccgtgcccttgttgcagggcagccgcgctcagcaagactaccgggaagcgcttgaattggtggaatacctgctggaaaacgacgaacaccatccgctgattgacatgctggcaaaaaagatcgccgaatatgaagacaacagcgccgaatttaccgcattcaaccagcgtatcgcccagttaccacagggggtagccgcgcttcgcgtccttatggaacagcaccaactcagccaaagtgattttgaacatgagatcggtaaaaagtcgttggttaaccaaatcctgaacggtaaaagatcgctgaccattccgcacattatggcgctggccaagcgtttcaatctgcccccggccctgttcctgccggaagcggattagccctcaactccggctcaggcagtccagcgccaccgctttgaagctgtcgaaactgtcgctgcccagcaggcggctcattgaacgttcacgcacgaaggtgacgaacagctcgtagatcgccatcgcctcttcataatcgctcttgctgatcgccagcaggaaaatcacgtgcgcaacctcaccttccccccaggcgacgccctgcggcgccagcagcgtcaccaccacggtcttcttcgccagcagccccagcgaatgcggcagcgcgataccttcgcccagcagcgtggagacgatcgcctcgcgttcgaccaccgacggataaaagtccgcgccgacgtacccttctcgctccagctggccgcacacccggctgaacagctccgcctgcgtcagcggctcgttgagcaccataaaatgttcggcgtcgaagaacttctccagcatgtacggccgggtgcgatccaccagcaccagcttgcccagttgctccagctgataatcggtcggaaacggcgacatcaccaccaccggcttgttcttctcgccgatgcgggcgttggaaatcacgaagtcttcgtcgatgtgcgcgagcatctcgtaatcgcgcagcgagacgatgcgcgtcatcaccagctgcgggtacttgcgcgcaatctgcgcctggatcatgcgcaccgtcgagttgccggtgtcgcacaccagcatcacctgcgggtggcgttcataaccgatgttgtaatgccgctccagccccacgccgatgtgcaacaccagatagccgatctcgttctcgctcagggtatagggggtgtacttgccccagctggagaccgccgccagcgtcacgtcgtaagccatcggatagtgctgcttgatgttggccagcagcggattggggatattgatctggtatttcacccgcgtaatcatggtcttgatatgggtgagcagatcggcccgcagctgctcgtcgccctgcaggttgtagttatagtgtgcgttgatgtaggacaggatgtagtccaccagcgcctcttcatcgtcggcgttgatctcggtcggctgcacgtcctgcacgcgccgcgcggcgatgttgacccgcagataggcctcttcggccatcgagatctctttgccggaggccgcgcgcagctccgccgccagacgggtcgacacctgacgcaccgcctcgtcgccgtcctccacctcgaagtccggcagcggataaccgtcgttgatgcgccgcagcgccaccgcgcagtagaagatcaggtactgctcgccctcgtcggtcaggcgaatggcgtattgcgacaacagcgggtgcaacaatccggcgaacgccgccacctgaggctgcaacaggatctcgttgttgagcaacgggttctcggcgtcggccaactgcagctggaacagcagatcggtcaggcaggcgcggatcgccatctccgcgccgaacagcttcatgccgtagcgcggcttggtttcgatcgtcaattgatagtgcgccagacgctctctcacctcagccatgtcgttttgcagcgtgccgcggctgacgaaccactcgtcggccagatcttccagtttgagagagaaggctgaggtcaaaaaacgcaccagcagataatgcacccgctcctgcgcgctgcgcggggtggcctgtttgcggcgctcctgatgctgcagggcgctgaatagcgcggcgttatcgacctgcaaacgatagccggccccgcggctatgcacgaagcgcgcaccgtatttgtccaggatctcgttcagcgcggtgatatccgcccgcaccgtgcgggtggacacggcgaaacgcttcgccagctcatcctgcggcaaagtctcggtttgcaaagcatcgaacaagtaagccaaacgcgggtaaggaaatcgcaccattctgtgtccgtcaatcaggcggcccacccggcgaaccgggcgaaccgggcgggccacgggttacttcgccggcggcaggaacgccatttgcgaggggctgccgatcggcagatagccgcccacaaagctgagtttgccgtccgtcgggttgacgctgaagcgagtgacgttatcgctgcgctggttcagcgcatacagatagcggccatccgggctcagcgccagcgaacgcggataatcgccgcgggtccaggtttccgccaccggtgtcaactcgccgccggcgcccacgctgaactgggcaatgctgttatgcagccggttggcgacgtacagcgtgtcgccgttcttgctgagcgccagccccgaagcgaagctggtgccctgatagtcggcgggcagcgcggaaaccgcatgcagttgtttcagagtacctttttggcgatcaaaacggtagctggtcaacgtcgaggcctcttcgttcaccagcagcacggtgtcgccgtccgggtggaacacaaagtggcgcgggccggcgccggcggaagaggcggcgatccacggcggatcgttcggcgtcagccggccgctcgcggcgtcaaagcgccattggtagatgcgatccaaccccagatcggtggagaacacgaacttgccgctcggatcgctggcgatcatatgggcatgcgggccgttgtgatcgctgatggcgaagctgccgttcaccgccgccgccggtttggccgcgcccgccgggccctgctgttgctgcaccgagctggcggcgcccaggctgccgtccgcttcaatcggaaaagccgccacgctgccgctgacatagttcgccaccagcagatggcggccgtccggcgtcaaggagagatacaccggccctgccccctgcgaatctacctggttgagctgcgtcagtgcgccatcggccggattgacccggtaagcggtgatgccgccgtgtttgccgccgttgaagtcggccacttcactggcgacatacagcgtcttgccgtcagcacccaacgtcaactgcgccggattcggcacgttgctgaccaacgtagcgtggctcaacgcgccgctggccggatcgacctgcacccggtaaacgccttcgccgttgggattgtaggtgccgatataggcgaaatgagatgacgtggagttcattgcatcctcagcatgcagcgccgggccggtcacggccagcagcgccaagaacaacgcggtgcgtcgggttggaacctgccagtttcgcatagtaatcctcagtatatatccgtcatctttcaagccgcagcgttgttggctgcccgcactcaccccagtcacttacttaagtaagctcctggggctcctgcgcttgccgcctagctgcaacttgaaagctataggctatagctaacggcgacgcggcatgccgcgccacgggaaaaccttcgcctcccagcgtttacctcatcccattacgcgttcaacccaccagctttttggtcatcgccagcagggttttcacgtcctgcggacgcgtgtcgccgctggcggcgtcgatgatcgaactgtagatatgcgggatcacgcgtttcacgccggccgccagggcgatctcaacgatcggctcgtagttttccagatcgatgccgccggtcggctccagcatgaagtcatgctcggcgcaggccttggcgacgtattggtattcgtccttgcacttcaggccgcccatcgggaaatacttgatggaactgccgcccatgtccttcagcaaagcgatggcggtttccaccggcacgatgccgtccggcgccgcggcgctcaatgggccggtagagatcttcacccagccgacgcggccggtcggcgacaccaggccgttgaccacgctgtcgttctggcccagcagcgcgcggctggcgccgacgccggtaaacacctggttaacgtgctgcggctgcacctgctgagcgatcaggctgaccatcgccgactgcttcggatcgccggcgcccaggccgaccgacagcgcgttgtcgatcaggcgcgcatagcgcagcatgtcggtcaccgcgctgtcgacgtccgggtagttcttggagagcacgcccaccagcacatggccttccgccgcggcgtagatgtcctgcgcgttggctttggagccggccagcacgttcaggcagacgcggtcgcgatagtagttaggctgcagcttcatgcttgtttctccgtaaacaggttcttgatacagctaaagacggtcatcagctgttgctcgtcgacgctgcgcacgtcgacctcaatcttgccctcgttggccttgtagccgcggaagtagatggcaatatcgccggttttcagcgcctgaacgatgtcataggtcgaccgccccagcaccgcctcatcaaaggtgatctcggcgcgggcgatatcgcggccggcgctgtcccagacggttttggcgctgacgccggtcagggtgttgaggctgttgaggaacggcgtcatccgcgccaccatctgttgcccggtggttttctcaagcgtcagatagctttcaattgcctgcgtcaggccgaggatgccctctttgccgaccttcatcgcccggccgatgccgccggactgcagcttcacccacccgacgtactgtttcttgccgataaccaggccgctggtcggcccctcgatggctttggcgccgctgtagatcaccagatcggcccccatctggtagtaacacatcagatcttcttccgccgcggcgtcgacgatcagcggcaggttatgtttgcgcgccaccaccgccgcctgttcgacggacagaatgcttttctgtacgcagtggtgcgatttgacgtacaggatcgccgccgtctgcggcgtgatgcaggcttcaatctgctccggcgaacattcgttggcgtagcccgcctccaccaccttgccgccgcccagcgccaccatggtgtccaccggcgcgccgaagttgacgttgtgaccgcgcggcagcacgatctcgcgcggcacggcgatcggcgccgaatgcaggttcaccagcagattggcgttatctttaacgatcaccgccgccaccgactgggcgatgcccgccgaggcgcaggagacgatcaccgcgtcctccacgttgagcagatcggcgatataggcgccggtcttgttgaccagatccttgatttcgaaatagtggttcaggccgtaatcaacggcgtcgatcacgtcctggcgcggcgtggaaacgccgagaatggtcatgcggccggaggtgttgatcacctgcttcaaaccgtatttttcataaatcgaagacatggcttgcctccccttgttcggttaataggatttccccggccaccaccgcagccagcggcaccaacagccgttcgccctcggcggtttgcccttcggcgtcggcgaacacctgcggttcgcggcgcagttcaaacagcgtgaaatcggcgtcatagcccggctccagccgccctttgccgctgagctgcagcgccgacgcggcgttctccgtcacgcaggcgatcacctgcggcagcgtcaggccgacgctgaagaatttggacatcaccgtcgccaggctatgcaccggcccgttcatgcggttgcggcagtaaatatcggagctgatggtgtacggcaaaatgcccagtttgatcgcctggcgcgccacctcgaagctgaagctggcggtgccgtgccccacgtcgagcaacacgccgcgccgcagcgcgcgctggatagactcgcgcaatgtgcccgccggcgtcagaatgcggttcggtttgccgttgtagcagtgggtgatgatgtcgccgcgggtcagcagatcggcgatgtcgtccagatccggcgggttgttgccgatatgcaccatcagcggcagctggcggttttcctgctggatctctttggccaacaccagcggccgggtaccgtttttccccaccacgctgctgctcatgcgcgccttgatgccgatgatgaaaccggggtgattggcgatggcctggccggcctcgcgcttgtcgatgtccgtcaactccgccagctcgttctgccgcagcaggccgatgcgcgagatgttgaggaaggcgaaaacgttggttttggcgctgcgcgtcagctgataaaaggcgtcgatatcgtcagcgccggtgctgccagcgtcgaccacgctggtgacgccgctggcgacgccgacccgatccggctcgtcatggtaaatcggcgattcaggatagcagtgcacgtgcgcgtcgatccaaccggcgctcaggcggcagttgcccgccagatccagctggcgaacggcgctgacgtccgccgccagccgccccaccgaggctatttttccgtcctttaccgccagatcgatcagcgtatcgtccgccagtctggcgcctctgattactaagtcatacataccgcattgctcctgttagcccgggcgccgccgcagcctcgggcggcgcctggcgcaggcctcttaagaaatggctaccgggaagatcgcccccaggatcatcgcgccgaggatcgctccgccggtgatcggtttgccccagatatagaacagcagcgcgccgagcagcgaaccgatgccgatcgggatcgaagcggtcatcgccgacaggatgatcaacggcccgaggaaacggcccgacgagttgcccgcgcccatcatcacgtccgcgccgtaggtggagttgctctgattgatggtgaatttgcgcgccaggatgatcacgtaaccgatcgccaggccgatgatcagaccggtggccagcgacgcggcgaagttggcgaccgggaacacgatgccggcccccagcagcagcgccggtacgcccagcccgacgccggtctggatcgcgccgccgatgtcgaggatgcccaccagcgagccttcgatgatgcgcgcgaacaggaagctggcgccgaacgccgccaccgcgccgtacacgccggtatccatccccgcccgcagcatggagacgaaggccacttcgttaaaggcgccgatgccgtacaggtagtacatgtgcgtcccggcgaacacgccggaggacagcaggccaacaaaaatcgggaatgaccagtcggcgtaccagaagcctttttgggtttgctcttccatcatcccgctccttatttaccgctcagggtgttgtgaatggcgtccagccagcccggcacgccgaggctgaaggactcgagaactttcatgtcgaagccgcggaagaagccgctcagcacgaacagcagcacgattaccgccatcatgatcttggtgattttgttccagccgctctcttcgacgcctttgccgatcagaatgcccagcaccaggcccggtacggcgttgcccatgatcagctgcgccaggccgccgaagatggtgccccagaagccggaacggcgcccggcgtcgatcgccgccagccagaagatcaccggcatcacggtgttcaccagcaggttggccgccggcaccagcaccttgatcgcggtgacctgcagcgcggcaggcacggcggaagcggtggtattgagaaacgccaccaccagcatgccgatgatgccgcaggcgatagccatttttttcggatcgtgcagcgtttgcgccagattgcggtttttgaccatcagggccgccgcgccccagtgcgggatgatgcggtgatcgacgtcctgcgtgaaggagcccgccgccacggaagacgcccaggcgttgaagaagaagcccagaccgaaggagaagtgggaagccggatcgccctcgcaggagttcagctcgcccagggtgcgaaacgctcccatgccctgtgttgtcggcgcgtggaacatgcgtgcggcgccggcccctacgccgacccccaccagcccaccgataataatcgatttaaataagatgattaaaaacatcagtataccctttcatttatgctaacgtttttatttcgtgacgaagacaaccttctcggtattgataatggttacgttcacggttatttccagagaaacggcatagctctttctttcacgcggcaaaaagaagaaaagaaatttctctttagttattttctcttccgccttcactacgctgacgtcctgcggctcgatgcgcagcagaatattgttggtggactttaataccgcgccctgcacattagccaaggcggaagcaaaagctttcgctttgctgtcgcctttaccctccacctttaccgatgtggtatattgctctttcattatgggttgccatgttttttgacgtaggcttccaccagtttctggcccagctcttctttatccataaagccgaaacccagcacgttgcagccttcgttaattgccgtcacgccctcttccaccgaacgcatgccgtatttggctttgtagccgtatttggtttgcgcggtaatcgcaccggcgccgccgctgccgcaaaaagagatgcccagctgcgcgttttccgctttcatgacgtcgcccagcttcatatccgccgccacgccggggatgaccaccgcttttccgcctgcgttttcaacgccctggccgactttttgccctttgcccaaacgatcgccgatcactacggtaatttgacccatggtatattctcctgattgaaatcgatgcgttaaccgctatgcgttattatctttcgccacttcgaagtgcacggacagcaaataggcctcttcgataggcaatgtgccaaactgatccaccacgcgctccgccatttgcatggactcggcggaaatttcgtcgaacaatgatttatccacctccggcaacggctcgccggttattgagcgcagcaccatggcgcgaatatgcgattccagcatctgttgctgcaccgcattggtataaatattctcagcattcagcatcgcggtaatatccgccagcacccgagcggtgatctcaccggcttcgctgatatcggattgttcaatttcttttaatgaagcagatccatcattcacttttcagtacccctagatcccacattaatcagtaagccgtaaagcgcatcacctgaataacccgctttctgtgatgtctttaccctacccccggcaagattttctgtggagaccggttttttccagttcgaagtggaaatcgaatgacgcgcggagatccatttcgcaaaacggcgctgcggcgaaaaagtgaatgagataacaaatacataacccggctaacggttttttttgtctcgattgacgataaaagccttcgtgatcgggatctctttcttttctcgccccaaccgcctactatcaatgggacaaatcgacattacccacacccccgctcctctggcgcgggggtgttgctttgtgttgtttttccgaatttatgggcgcacagactggcgccctttgatttgactggagagtggaatgaccaaacccatcattactattaatgagctggatgcggaacgcctggatgcgctattggaacaaccggcctttgccaacaccgacgtcgccgccgcgctgaacgacgagttggatcgcgcggaaatcctgccgccggagaaaatgccggccaacgtggtgaccatgaacagccgcgtgcgttttcgcgatctgcacaccgatgaagagcatgtgcgcacgctggtctacccagcttcgctgaaagacagccacgatcagctgtcggtgatggcgccgctgggcgcagcgctgctcggcatgcacgtcggcaagcagatctcctggcaattgccgaacggtgaagaagcgcggattgaagtgctggaattgctgtaccagccggaagcggcgggcgaataccaccgttaagcggttttcagggcggcatccggccgccctttctgtctcagaggcagatagcgatcagcacggcgatcagcagcagcacgtagattttggcatgcagcgcatcgctcaccttcggcaaacagcgcctggcaaacacgatccccgcaatccccgccgccaccagcagccccagaatgttcagattgacgtaacccagatactgcggcccgctcatctcgcgccaccccaacacgatatacatcagcgccccgatcaccgccaccgggatcgacagcgggttggcggcgctgacgcaatatttcatgtcgtaaccatggcgacgcagcagcggcacggtcatcacgctgccgcccacccccagcagcgtggcgatgccgccgatcaacggcccgccgccccacaacgtggcgggagacagttcggcgcgcgccggtttgatcaggaagccccggcggaacagacagtcggcgatggtcaccgtcatatagaccacaaacagccagcggatcacgccgtccgccagcagcgaggaggcgaacgcgcccagcgccgcgccgatgccgatgaaaaagatcagcggtacgatggtttctcgcagcaggttgccgctgcgccagttggtcagggtggcataactcgcgttgaggatcatcaccgctgtcgaggtcgctacagcaatatgcatcgcctggccgggctgctcgcccgaggcggagatcaggtgatagacaaaaggcaccaccacaaagccgccgccgaagccgaacagaatggtggtgatgccggtcagaaaaccggcacccagtacaatcaacgtttcaatcatggccgtgcgcccgcacgaagtcgtcgaacccggcgcagaactgccccgccagcggatggaaacgatcgccgacgaacagccccagatactgatcgcgcacggcgtcgtgatccaccagctcaatgcccgcctgttccgcccgcgccagcgtctgtgcgtccgggaagccccaatagcgcgaatcaccctgcttttccgccgctatcgcttcgcgccgttccgcccgcatgagctggcgcgccaggaaggtgccgctttgcacgcccagcaacatcatgttttccaggaacgacagatcgtgacgcagctcggcgggcagacgggcgagcaccgggccggcgtcccagtgctcatccatttcatgcagcgtcaccgcacagcccttgtcaccgttcatcattgcgcggaatagcgtcatcaccccgcgatagcgcggcaagtcgccggggtgcaggttccacagcagcttgccgcgtcggctgaaggcgcgcacatagtcggcggagaatttctgatagcagcgcagggagatcaccgcgtccatatgctccaggctgctgataaacgtggcgtcattgatgtcgagaacgcgatgcgctttgaccccggcggcggccaggaacagggccggcggttgataggcaccctcacaggcggcggcgttgcggccaacgaacgggaatacaaaatcgttcagcacctcgcgctcgtacagccccaggcggcgaaccgccggctcctgggtgcggccgccgcttttcgccaaggggaaatacaccgtaaaagcacactcgcctttcagggcggcgatcagatcctgacacaccagccaggagaaaatgtcgttgccgacaaagagcgctacgtttttcatacttcagccttctttgcgttgaaaatagggttgttgaacacgattttgctgatatcccgcgtgatggattccatcgccgaggtataaaaaagatcgcccttggcgggcgcgccgagcgagtagagatgctgctcacggccgcgtcggtcggcgattttcagcgtatgcgggttgcacttcacgccaccgaacaggttctcttgcaccagcccgtcttgcagcagctgctggctcaggcggttgggcggcagttgataggaaggcgtggtgcagttgaacagatactgcgcgcgcacccgcgtctcatggcaacgaaggataaacccgtccgttgccttgctgatatccaccaggccgccgcaggcgcgcaggcgttggctctccagcgccgccacgatcttgttggcattcttgatcggcatggcgtgccgattgcgcatccaggaggagttgtaaaagcgcatgaagacctgccggttgttggcatccatcttgacccaggcggcgcacaccgccgggtggatcgccgccagatagctgcagatatgctccctggcaaagcgcgcgcgatcgaggctgtccgccagatcgcggtagcaatcgcgcctttcccccagcgccgagagcaccgtcagccgctccggccccggatagtggcgcgccagcgcggcgttgatcgcatgcaccagctgatgcgcgtcaataaaatcgcggccggcgacaaagcgccgcagcgcctcaacaaacgcgtccggcggcggacgcatcagcgccggctgcacgctggggaacaggcccgagcgcgacagggcgcagatgtcggtcgctcccagccgctccatcagttcaacgatggcgtcaatcgccgtcaggctgcaaccgatcacgccgatgctcgaataagggttgatcggcggcagatcctgatgagcctgataagcgatcaccccatccactgggtaaaggcattccggcgggttgtgccccgaacacagcaccagcgcgttcatctgctcggcgccgccgcaggcggtggtcagccgatagccggcttcgtgcggcgcgatggcattcacttcggcggtcacgaaattcagcgctacgttactgtccgccgccatatatatcgtcatgtcgcgaataaaatcgagatattcccgatacagccagcgcggcggataacgatcctggcaaaactgcggaaaatgcatggcgatccaatcaacgaagtgcgcttcgtcgaaaatatccgccgacatattttccggcgtcatatttaatatatggctgtcaaaatcgctgctgtatgccataccgcctttaaatccctgcttgtcgaaaaccgtcagggaaagcggccttttgcaatgattaaccgacttattttttataaagttataggcaaaagagatgccggcggccccgccgccaatcacaccgaacttatacatgaaatatcaccttatagtcattgaactgcgctaagaactattgcttcaggtgttggaataaaatgacgctttattccttattaacttcttgtattgcgagaacgagaaccttcgtcccaccctggtgtgaggacttgtacgggcttcatggccgataaaataacggcgccccgaacaagcgttatttttctgccccgatagtagggcgaccgtcgctggcttgctttatatgaaaggccaactatcattgcgtttcggccaatttgcccgccaaagggaacacatgcgcaacgtccgcattgatgacatcgaccacgtaacccgcgcggtgatcgccatcggcaccgattatccgccggggcacctgctgccaatgcacagccaccggcgcgcgcagttgctgtacggcgctaccggcgtcatgcacgttttcacgcagcaaggtaattgggtcgttccgccgcagcacgcggtgtggctgccgccgcagatgccgcacgcggtgcggatggtcggcgtcaccacccgcagcctgtacctcgaacccggcgcgttacccgccgaacgcccgcaggtatgtcaggtggtcagcgtcacgccgctgatgcgccagctgttgatggcggcggtggatatgccgctggagtatgaacaacagggccgcgacggcgcgctggcggcgctgctgctgcacgagctggcccggctgcaacctttgccgttgcacatcccgctgcccgccgatcctcggctgggtgagctgtgccgcgcctttttgcaacaccccgacgcccacgactccgcgcagcggtgggccccgcgtctgtacatgagcattcgcaccttcagccgcttctttcgcgcgcagaccggcctgcctttttcgcaatggcgccagcgcgcctgcgtggtgttggcgttggcgctgctggccgaagggcacagcgtgacgcaggtggcgatggagatgggatatgacagcagcgcggcgttttcaaccatgttccgccgcgtgctggggcaggcgccctcctcctatctgacggaagacgggcgcgacggttgacggattagcggaatttcttgtggttggcgtcgcgggtttgtttgaagccttgcgccaattgcttcgcttcggcgactttgccctgattggccagcgccagcgcctgatcgatctggccgatcagggtatccaacccgctgcggaaatctttcatctccgggctgtcggcggctttgtcttccagcttcggcggggtgccctgtttggcatcctgcgcggcggcgcgcatgttctgcaggctctgtttgagggtagcggcggagtcggtattcagcaccgttttgtagttttccgccagggtgtccatatcgtcgcccagatcggcggcgaccgccagcgaactggctgccagcagcgtcaacgccgccaacgctttcagggtattctgcatgtttgctcaccttccagttattgttgtaattaacccaccgttaccataggcaaggccgggaaaaatcgaaaccggagatttgtaagcaaggttgagacgggataacgcgcggccggcgggcgccggccgcgcagcggatcactggccggcgatcttcatttccggcagcagcaccgaaccgcactggatattgctgcgggtttcgatatcgctgccgacgctgacgatgtttcgcagcatgtctttcaggttgccggcgatggtgatctcgctgactgggtactggatctcgccattttccacccaaaaaccggcggcgccgcgagaataatcgccggtgacgccgctgacgccctggcccatcaattcggtgaccaccaggccggtaccgagctgcttcagcatgccggcgaagtctgcgccctgcccggcaatgcgccagttatggatgccgccggcatggccggtgctgtgcaggcccagcttgcgcgccgagtagctggtcatcagccaggtttgcagcacgccatccttgacgatatcgcgccgctgggtgcgcacgccctcgctgtcgaacggcgtcgacgccagccctttcagcaggtgcggatgctcctcgacggtcagccacgccggcaggatctgcttgccgagcgagtccaacaggaaggtagatttgcgataaacgctgctgccgctgatggcgcctaccagatggccgaacaatccggtggccacctcggaggcgaacagcaccggcgccttcatggtcgacagtttgcgcggcgcgagacgcgccagcgtgcggcgggcgcactcctgccccacccactcggggctgtgcagatcgcccatcgcccggccgatggtgtaagcgtaatcccgctccatgtcgccgtcctgttctgcgatgacgcagctggacagcgagtgacggctggaacagtagctttgcagcatgccgtggctgttgccgaacaccttgatgccgtagtggctgttgaagctgccgccttcggtgttggtaatgcgtttgtccgccgccagcgaagcctgctcggcgcgcgccgccagctcgatgccgcgctcggcgtccagctcggtcgggtggaacagatcgagatccggcgcctcgaacgccagcagatctttctccgccgggcaggcgcagggatcctcagaggtatagcgcgcgatgtccagcgccgcctgtacggtgcgagcgatggcgtccgggctgagatcggtggaagaggcgctgcctttgcgctggcggtgatacacggtaatgcccagcgcgccatcgctgttgaactcgacgttttccacttcgccgaagcgggtgctgacgctgatgccggtcgatttggtgaccgcgacttccgccgcgtcggaaccggcgcgggccagctccagcgcctgagaaacggcctgttccagcgccttgcgctgttctgcaacttgagtgactactttcatcaatctgccataattaatcagaaaatcgttgagaaaagtgccggagcggcgtagttgtgcacgcggagcggcgcgcaaaaatcctgagatctctgccgttgagtctaacaggaaccgcgttgaatttcgcataaagccggcaacctgttaggattagcctctttttaacggagcctaccatgaacaaacagcctgaagactggctcgacgatgtcccggagaatgaaaacgaggacgatgacgagattatctgggtcagtaaaagtgagattaaacgtgatgccgaagcgctgaaagacctgggggccgaaatggtcgatctgggcaaaaacgcgctggatcgcattccgttggacgaagatttgcgcgccgccatcgagctggcgcagaagatcaaaaaagagggccgtcgccgtcagctgcagctgatcggcaagatgctgcgcgcccgcgatatcgagccgatccagaccgcgctcgacaagctgaaaaaccgccacaatcagcaggtttcgctgttccacaagctggaagcgctgcgcgaccgtctggtcgaagaaggcgatgacgtcattccgtcgatcctggatctgtatccggccgccgatcgccaacagctgcgttcactggtgcgcaacgcgcagaaagagaaggccgccaacaagccgcctaaggcttaccgccagatcttccaatacctgcgcgagctggccgaagcggccgactaagcgccgccgccatcccgggatgaacccgtttcatccccggtgatgtgccggttcgccgctgctttcgcggatattgaagcgcaggctgccttccagctcttcttccgcctcttcaaacagcagaatgatcgcgccgaaacgacgcttgctgcgggcattcaggtgagtgaactcgatttccaccggcagaccgatatcgccggtcactacgtcccacagcgcgtcgaggttggcgccgaatccctcgtccagcgcaaacttgtgcgcaaaatcgcggtagaaggtcggcacatcctggatctgttcaaaatcaaactctacttttgccatcaaactcactccacacgaatgaagtttttgtaatggtcgcgcgtgacgaagatcagaccgtcgctcgaatacagcaggcgatcggcgccgcgccggccacactggtaattgatgtccgcttcgcgccagacccggccgccggcgctcggcagttgcccttcacggttagagaatcgatcgccgccaatcgccttgcccggcaataccgcacagaggttgcctgaacgcgggtcccagccctgctcgcgcgcctgcttcttggtgacgtaatagcccggaagccgctgatgctgctgcaggtagctcaccaccgtttgctgctgcgtgagccgatcgatgctctgctgttgccccgccggcgcttgcaccaccgtcgcattgccgccgatcgcacggtgctcgttgccgcgcagcgcgctgaagacggcgatgaccacggcgatgacaatcgccaacagaatccgcttgttcatgacattccctgaaattatgccgccgaaggcgccgcagctcccccaggctagttaggtatatagccgaccaggatgaaactaagatgaccggcacgtcacgttttcgcggcggtaagcgtttcatccactcatgacaatgatgccactttccagccgttctggcactcggagtctctctgaaaacgggccgcctcacatgagacggctcgccatgccaggcgctgctttcagtatagtcagggaaggcgccgcacaacgcggcgcaacaggagggaacgcatcaatcgatcaaggcgtgacgatagcgatgcagcatgtcggccaggcgtttcaccggcccggtgacgctgagcggcgcctgattgtccaccagcttctgctggtactcgttcatttcacccagcaagcgatcgtagtaataggcgcgcttgacgtcgttcttggcggagaccacccgatcggcggtgctgcggatctggcggtggaaggccgacagctcttcgctgaccggaatctccgcccgctgcatgcgctggtgggcaatgatcaggttcaacgccagacgatacttggcgatgtcgttcgggaacatcatcagcagctggttaagctgctgatacagcgcaggcagatggttttgccgacgacgcgccgccttggtggtcagcgccgacaccgcgctgctgacgaactggttgagcaacgtgcggccggtgcgttcacgcgaattgtcgcggatcaacagcagcaccatcagcccaacgcagctgccgaggaactggcccagcgccccgtcgagaaactgggtgacgttgaactccatcgggttgctcagcaccagaatgttgatggtcccggccagcagccccagcgaaccgagccgccgcttctgcacctcgatgccgatgaaaaacgccagcaggccgaggctaagacacagcagcaaaatgctctgctgcgtcgccggcaggatcaccatgaagaacagagagccgaccgggatcgccgccagcatgcccagcacgaaatccatcgccaccatgcgcggtgccggggtgcgcatcgccagcgaggtgatgaccgcgatgatcaccataaaaccgctgccggacgtccagccggtccacagccacagcaggctgccgaaggccgtcgccacaaaggtgcgcaggccgttgatcatcgcgtgatgcccttccgccgaagtcggcttgaccacggtttcgttgctcaacaccccctcttccaccgcgctgatgctgcagttggcgtgcacgcctttcgacagcagcaggtagcgcgtcgccgcgccgacccagccggtgagggtcggcagcgtttcctcggaacgatgcgtggtcagcacctggcgcagcagcttcatgcgcttgtggatctcctgcggggtttccgccgggaccatcagctgctcacgcaggctgtctttcagcgcgtccgggtgattcaacaagatcagataggtttcgcaggcctgggtgatcagcgtcagcgacagggtatgcagcgcttttacccggcggttgaccttctgccagcgcgaggactccatcatcaggttgttgcgcatgccgtccagcgccgtggtgctcttcaccagattgctccaggcgcggtcgatatcctctttgtcggcattgctgatgcacatctgcatcaggcggtattgcgccaccagcagttgatccaccgcccgatcgatgtcctgtttgatcgaacgcggcgagaacagcagatccgccaacacggcgctgacgatccccagcacgatctcgctgcaacgctcgatggcgaactgcggcgcttccagcagatgagactcgctggtggcgaccgtcacgatgatgatcagcgcggtatacccggccagcccccaggcataggagttctccaccttgataagcgaagagagccaggtgcagaaaccggcccagatgcagcacagcaacagcatcaccaccggcgcacgggcggtggtgatgataatgatcaggccgacgaagcaaccgataaaggtgccgataatgcgcagccagccgcggtggcggatggcgccggagaagggttcgccgccggcggcaaaggccgggccggcggcgacgatggcggcggtcatcgccgaccagcgcggggtttccagattgagatggaagccgacgaacagcgcaaacacaatcgcgaagctgagtttgaaggcgaatctcagccggataaaggttgggctgctcattagccgaactcacgcagccggtgcatcaggcgcacaaaaggcgagccgctgtcggcattgcgatcgttcttgccgacgatcaccacggtggcggtggtgccggccgggtacggatgctgttgatccttggcgtccagcaggatcttcaccggcacgcgctgcgccaggcgcacccactccaggttgctgtcgatcgaggccaaccctttgttgttcaccgtgctgctgctgttgttcaccgccgccgccacgctgtcgacggtgccgtgcatgatacggttgctgccgagcggggtgatctccgcgcggtcgcccttattcaggccattcagcttggtttcttccaggtacgccaggatgtagaaggaatctttcttcaccagcgccaccgccaccgagccgcgggtgatgtattcgccggcatggacgttgaggttggtgatccagccatcggccggcgcccgcaccgtggtgcgttccagatccagctgcgccagctcgcgtgccgcaatggccttcgccagctggtgctgcacggtctgcagtgagttgttcgactggtcaatctcttcctgcgacatcgcctgcacgcccagcttcacgcggcggccggcctcgcgccgtttttccgccgccagcgtctgatagtaggcgacgtcggcgccggcttccgccagcgcctgctcataacgcggccgatcgaccacgaacagcacctggcctttcttcaccagttggttatccaccaccggcacgtcggtcagcaggccgctgacgtccggcgcgatcgccaccacatcggcggtaaacttggcatcacgcgtccacggcgactcggtgtagaacacccaggccttgaatatcgcggcgatgcccaacagcacaagaatcaaagtgatcgcgattcgggttatttttatcgaaaaatttttcacagcgacctcaaacaaaaagacacgaaatcagataaaacaagcagcaatacagcgcggtattaaacagcgccggatgccagacaaaatcgtaaatccccgtcggctgcagcaggcggcgcaggagaaaaaacagcgccagcgacaccagcagctcgaaaaacaccggcggaaacgacagcccgaagatgaccataaccggaagcaaactcatcactttttccttattgttcactacgccggggaaagacacatctcgccattcacattctctttacattttagcgtgcgcgcgccacaaatcttgaccggacagcttgtccaggtcacgaacccgaaaaaaggttaaacttgggggcagacatccacgacagggattgcgagggtgccggaggagcggcaggattgcgttgccgatcgctctcgcacgttggtaaggtctattcacccgaccacgttatattagcctgcttactatcaaggcatcaacaatctgtgatctaaatcacttttaagccagagtgaataatggaaagattaaaacggatgtcggtattcgccaaagtggttgagttcgggtcgtttaccgcggccgcacgccaactcgacatgagcgtttcatcgatcagtcaaaccgtctcgaaactggaaaatgaactgcaggtcaagctgttgaaccgcagcacgcgcagcatcggcctgaccgaggccggcaaaatctactatcagggctgccgacgcatgctgcaggaagtcagcgaagtgcatgagcagctgtacgcgtttaacaatacgcccgccggcacgctgcgcatcggcagctcgtccaccatggcgcaaaacgtgctggcgaacatgaccgccgagatgatgaaagagtatccgggcctgacggtcaacctggtgaccggcataccggcgccggatctgatcaccgacggactggatctggtgatccgcaccggggcgctgcaggactccagcctgttctcccgccgcctggggcagatgccgatggtggtgtgcgccgccaaaagctacctgatccagcacggtacgccgcagaagccgagcgacatggtcaacttctcctggctggagtacagcgtgcggcccgacagcgaattcgaactgatgtcgccggaaggcatcaccacgcgcatttccccgcaggggcgcttcgtcaccaacgactcctccaccatgatccgttggctgaaaaacggcgccggcatcgcctacgccccgctgatgtgggtgatcgaagagatcaaacgcggcgagatcgagatcctgttcaaaagctaccattcggatccgcggccaatctacgcgctctataccgagaaggacaaactgccgctgaaggtgcaggtgtgcatcaactatttaaccgactatttcgaacgcgtagcggcggtctatcagggttatcgctgagcagcgcttaaatagcggcgcgccagcgcggccagcagcatcagcgccaacatgccgatgccccacagcagccagacggcgtagcccgcccaggtcagcagcagaggaaaatagctcgccagcccgctgcccagctgtttcagccacggcagccaggcgtccagcaccgcctgcggcaccaggctcagcgcaccgttcaccggcaacgatgccttcccggctgcctccgccaacgccgggagccaggtcagcaggccggatacgccccaggccagcaacgtccacagcgccatggcgccgagcagcagcgcgaccgtccagccgccccgattcacggcacaccgccgccgcactgcggacaaaagcggctgcccggcggcaacggcgcggcgcactgtccgcaggtggcgctcactgcggcaaacggctgaccgcagcggtggcaataacgggcgcccgatttattcactgcccggcattccgggcactgcggccccggctcgccatgctggttatagcggttgccatgatgcccgccgccgtggcccgcgcgctgatgaccgccgtgaataccgccttgccccaacaaccgtttcagtaagctcatcccgcctctcctctgtgcattgacgctgaacctcactgtaaaccctggagtaaactccagggtaaagcctggcgagcaggatttacgtttcattacatcgtaaaattggcaaggctttgatgccgttaacaaaagcaccatcggcattatcccacgccgtcgcgctgcgttatgctgcggaaacctctccctgcatcaggaataaccatgaaaaaaatcatactggactgtgacccggggcatgacgacgccatcgctctattgctggcctggggcaatccgcagatcgacctgctggcggtcaccaccgtggtgggtaaccagacgctggacaaagtgacgcgcaacgccctggcggtggcccgtatcgccaatatcaccggcgtccccttcgccgccggctgcccgcgtccgctggtgcgcaatatcgaagtggcgcccgacattcacggcgactcaggcctcgatggcccggtgctgccggaaccccacctgcagttggactcacgccacgcggtagacctgatcatcgaaaccgtgatggcccacccaccgggcagcgtgacgctggtgccgaccggcggcctgaccaatatcgccatggcggtgcgtaaagagccgcgcattgccgaacgggtcaaggaagtggtgctgatgggcggcggctatcatgtgggcaactggagcgcggtggcggagttcaatatcaaaatcgatcccgaggcggcgcacatcgtgttcaacgaaaaatggccgctgaccatggtcgggctggatctcacccaccaggcgctggccacgccggcagtctgcgaacgcatcgccgccctcggcacccggccggccgccttcgtcggcgaactgctggcattctttgggcgtatgtaccaacaggcgcaaggcttcagcgccccgccggtgcacgatccatgcgcggtggcctatgtgatcgatccgagcgtcatgacggtgcgcaaagcgccggtaaatatagagctgaccggcaccctcaccttaggcatgacggtcgcggacttccgcgcgccgccgccgccggattgccacacccaggtagcggtcaaactggatcaggataaattctgggatctggtggtggatgcgctggagcggatcggggaggtggagtaagcgaatgagaaacgagattaacgcgcttttacaggcgcgttagtccgtattctgccgcggcaacgggaggctcaggccataacctcttttatttccaatacagcagaacaatcctaacaataaatcattttataaaaattaaaaaaaacaggcaaagacaagaagaatcttaataaaaataaaaccataaaaatcacattgaatttaaaaaccagcaatggaaaacgatggaataaatctccgccgtcacgccgccgctgacgaaataaattaaacaataagatacctattttattcttcacattgactgccgacataggccatcgccgagatgccccacgatattcacacacgtcaagacaaccatcaaccaactgatttcaatgaataaaaataatattagattaaaatttgactgaatcacaatggatttgagaaaatagcgcatctgtttttgcaaacaacaaaaatgccttttgcgggtgaaaaatacggcttaacctttctttaggcacacggtctcgcgcattctcaggggtaaacattatttatcgcttcaccatgaagacggattaaatttcccatgagacattttcgaattgaacattacacgcatttcaacatcaggataaaggatagggaataatcaaaacatgcatttcataaacgctatcaggccatggcaggttaaccatggccgataaatctcccgctaacgcagcgaccatcgccgtgctgcccctgctgctgatctggatggcggcggtcctgccggtttattaccccaacatgggcggcgacggtctggcgctgccgcaaaacattctggcctggagcgtcatggcgctcaccacgctgatcgtgacgtttaccgtttgcctgggtcgcatccgtttttcgctaacccccaccgcccggcggttgctgctcggcatcgccgtactggcgttgccgctgctgtatacccgcctcgagtggcgcgaagatgccctgtggcgctgcgccggtttgctcggcggctggctgttctatgtcgcctgcctgcagctgcgcctaaccgcccgacagcgcgagctgctgctgtacggtctgctgttcgccatcggcgttcaggcgttgctggcggcgctgcagctgttcgcccccacgctggcctgggtagcccctaacggcagccgggtctacggcgtctttcagcaaccgaacgtgctgggcagctttatcgccaccgggctggccttggcgctctggctgctgcttgctcccctctcagcgccaacgtggcggcggcaaatcccgctgctcgcgctgctggccgttttctccgccctgctggtactgatccagtcgcgcgccgcctggcttggcggcgccttggcggcggctttgctgctgtgccgttttgcccgccggcgcccggccgcgagccgctgggccggcggcgcgctgctgctgggcgtggcgatcggcctggcggtgctattcaccggtttcggcctggatggccgcgcgggtctgatcggtcgggagctgtccaatagcgctcgcctcaccatgctgcatgacgtcggcgccatgatcctggccaagccgctgctgggctggggttacggcggttttgaatacagcttcgcgcactttcgcctgcaggaaatgccctggcgagaagtgttggaagtcgccgggcatccgcacaatgaaatcctgctgtggtggattgagggtggcctgccggcgctggcaggtatcgctatcgtccttgccgccggcgcacggctgctgaaaagcgcctggcaacgggatcgagaacagccgaacggtgcgcgtgtcggcttgttcctggtgctgctgccgatgctggtgcacacccagctggaataccctttctatctgtctgcgccgcactggctggcgtttctgctgctgctggcgttgctggatggccaaagcggcgagcctcgcccgctgccgttcgccaaagccctgagcctgccggtggcggtggcggcggtcggcgtgctggtgatggcggtcttcgcctggcaagggcgcatggcgctcacccagtcggagcgcactatgctggccaacatcgacagcatcgagcagatgccgtcgccggccgcctggatctaccgggagcgcaaaaccttcgacgagcaatctcacgcgctgctggtctacaaccagacgcgtgatgatgccctgttgaccggctatcggcagtgggccaatgcctatctgcagcaccgcatcgacgccaacgtctacgccacgctgattatgatcttgcgctatcagggggatcaggcacaagccgacgctcgcctgcgggaagccgctttcctgtttacgcgggatgcgcggtttaggtagggcaacaaggtgagagcgatgcctcgtcgctctcacctgcgtcatttatgtagcaaaatcaacgcggcaatatcgcgcactctttatccagcagcgactctaccgacgcgcgattgccgacgtcccagccgcgcttcgaggccagcaagataaacccttgccggccggcaaacatcgtcggaacgatgaccacgccatattccgccagctgcggcggcgacagatggaaataatccgccaaatccttaatcgggtagatgcccatcacggctggctgcatcacgcggcgagcataataggtgtggcgcaacaacttatccggcaaaggccgccattgttcctgtatgtaggggcgttccgcctgcaattggcgccgcacgtcctcgcgcagacaggtcaggtgaatgtgcaactggttttggctgcggccgtaagcggagttgatcgccatgcccaacatatcatccggcaccggcccgccatactcggcggccagccggtaacgcatcagccaggcatagccaaaatagtccgtccgttctccaaccagcagctgcgggctttcaatgccggagagcggcgccgtcggcaccaggataaagtgataagggtaacgcgggttctgcagcacgctaaagcccagggccttcccctgcggcatataaatctgctcgcacggggccggattgcgtttttgctgatagttggccatgcagagtttatcgaccacgccccacagcgcatcggaacgggcgcagcccgtcagggacagaacgcccagcaccagcagccaacgccgagcggataatgccaggcgcgtcattcttgtcgtgctctgttttttcgccacgtcaatttcattccattatgtcgtgcaggctacggcgtcctgccgcgcttagcgttacgaatgcgagaaaggccgcgaaatggagcatggttgaggggccaacgcgtgaccccttgaggaaagattacgccgtgccgccgacggtgagcgtgtccagtttcagcgtcggttggccgacgcccaccggcacgctctggccttccttgccgcacacgcccacgcctttatcgagcgccagatcgttgccgaccatagagatctgctgcatcgcctcaatgccggagccgatcagcgtcgcccctttcaccggtttggtgatgcggcccttttcgatcaggtaggcttcagtggtggagaacacgaacttgccggaggtgatgtccacctgaccgccgccaaagttcggcgcgtacagaccgtactcgacgctggcgatgatctcttccggcgtcgattggcccgccagcatgtaggtgttggtcatgcgcggcatcggcagatgcgcgtaggactcgcggcggccgttgccggtcggggcgacgcccatcagccgcgcgttgagcttgtcctgcatgtagcctctcaatacgccgttttcaatcagcacgttgtactggcccggcacgccttcgtcgtcgatcgccagcgagccgcggcgcccttgcagggtgccgtcatccactacggtgcacagttcggacgccaccagctcccccatatggccgctgaataccgaggtgccgcgccggttgaagtcgccttccaggccgtggcccacagcttcgtgcagcagcacgcccggccagccggcgcccagcacgaccggcatattgccggccggcgccgccaccgcgccaagattgaccagcgccatgcgcaccgcttctttggcgtaagcgtcggcgcgcacgtcgccgtcgacggtttccaggaagtaatcgtaaccgaaacggccgccgccgccgctggagccgcgctcacgcttgccgtcctgctccaccagcacgctgacggagaggcgcaccagcgggcgaacgtccgccgccagcgtgccgtcggtggcggccaccaacacctgctcgtaaacgccggtgatgctggcgttcacttcctgcacccgcacatcggcggcgcgcgccaccttgtcgacgcggtgcagcagagcgattttctcttcgcgcggcaggctttgcagcggatcgagcagcggatacagcgcccggtaaccgatttcgcccagggtatgcgcccgcccgtcgccctgctcgcgcacgatgctgcgcgccgcctgggcgctctgctgcagcgcattcagggtgatctgatcggcataggcgaagccggtcttctcaccgctgacggcgcgcacgccgacgccctggtcgatattgtaagagccatccttgatgatgccgtcctcgatcacccaggcttcgtgatagctggactgaaaatagagatcggcgtagtcgatacggcgttctgccagttgacccagtaccctgtacaggtcttgatgactcagcttgttggtagcgagtaactgctcactgacaaacgtcaggctcataatggtttcactcttgattggaggatagcttgtcagacggcgccgtcagcgacgtctggaatcggttgtgctgcagcaccggcatctgcgcacgaatatttttcaggcttgcggtgtccacgcgcaccttcagcgccgccacggcgtccgcgttctcggccagcaccttgccccagccgtcaacagccagcgtgtggccccaggtacgacgagtcggtccgtggcgccccacctgcgccggcgccaggatcatgcactggttttcgatcgcccgggcgcgcagcaggatttcccaatgcgcctcgccggtgacccgggtaaacgccgccggcaccgaaatcagttcggcgccctgtgcccgcagcgcctggaacagcgcggggaagcgcagatcgtagcatatggtcatgcccaagcgcccgaccggcgtatccaccaccgtcaggtgctgcccgtgctggtaggtatccgactcgcggtagtggccgtgcgcatcgttgatatccacatcgaacatatgcagtttgtcatagcgggcgcggatctcgccctgctcgtcgaacaacaggctgctggtagtgataagttccgggttttcgcggctgatcaagggcatcgagcccaccagcaaccacaccccatagcggcgcgccagctcacgcaccgcgttctgcagcgggccatcgccctgtttttccgcctgttggcggtaggccgcggagttggcgaacagcagcgcgttctccggcgtcatgaccagttttaccccggcattgagctgcttgatctgctgttcaatctgggccaggttatcgcgcacctgatcgccactgcacaactgcaacaacgcaacgttagcattcctcatgacgccttatcctcctttgccttacgaagtacctcattgatcttcggctggtcgagatcgccgccgatatggtagcgaatcagcgaaatcttgctccacagcggccccagcacctgcgaggcggcaaataccgccgcgccgacgatcgggttgacgacaaacgccgtggccacgccgacggtcgccgaaatcgccggcgccaccaccgcctccatatcgatgcggcggcgcgccagatcgatctggccgctcatggcgatgtccgccgccaggccgtcgatcaatagattatcagtatgcattatgccatctttcagccaggcggtgctgcggatggaatcaaagtagaaacctttgccgaaggtatcgctgaaatcgaactgcagcttgcgcagcagggcgtcgaagctgaccagccgcagcagctggccggcgcggccgccgcccatgctgtcgatctcgcccttgcccatcttgacctgcagcgcgccgcttaacgtatcgacctgcggctgccacggcgcgccgtgccagtacagatcgaagtccacgtcgtaaggcgcccccttcagcggaatagtgatgccgaagaaggcggcggtttcatcgatcttgccgccgagcagtttgcctttcagcgagctgcgctcttcctgcgcgttttgtttccacaggccggtggcgctcatacgccctttaccggtatcgaccagaccgtgatccagcgtcagggtatccccccgattagtcagatccgcctcgaccttgccgaggttctgccccagcacccagcacgacttacagcgcagcatcagcgaaggccagtcgcggaaggaaactttctcggtcgacggcgacggtgcgcccgccgcgtttttcgtctcggcgaactgtgggttgtaatacaggtagttgatatcggcgcgccacggcccgcgatcggccacccgcaggctgccgtccacttcgtcgctcttggcgctcaccagggtagcgccaagctgtttttcggccgatagcgtcagcttatgccaggcctggccgcccaacagcagctgcggcgtagtcagcgccacggtggtagggaagctgaaaccgcccacctgaccgctgccgccgccctgtttcagtgccggcgccagcagcgccagccactgctcaccgtccagcgccggcagattcagcgtcatcgacttgccggccggcagcggcggcgtgccgcccccgttggtttgccaggcggcgcgcgccagattcacctgttttttatcgaagttccattcgctgttgaagcggttctgtttgcccgcgctgccggtcaacatgaaaccgttcagaccgcctttgaccttgacgttcaccggcagtgcctcgcccgctgccttgtccagcggtgaaggtaagtgactgctcactttcttcaaatccgcgtcaatgccgatatcatagctggccgagccctgatgcggcagcgtgatggccacctggctctgccagggcgcgctgccgctgagcgcatcagcggcctcttttggcaggccggggaacttgcccggctgccagtcgcccttcaggccgacattgatcttgtaatcgcgatcgccttcctgcgtggaaaagttgaccgccaccggctgcccgaaccagttggccgacagggggtcgctctgcaggttgccgttgtcgaagcggaacttgccgctgagcttttgcagttcgctgtccagcggctttatcagcaacgaattgttgttcagcgccacttcgccggtggctctgacctgctcgccgtccaggggaatatcaagatgtaagcgcccactgacatcaccgccaatctgcagctgctccagcgccgccccgagcgaatcgtgcaacggcgtctgcatgaagtagtcatgcacgtcgctgcccgcacccgcgacttcggcgtcgatcagcagccgctctttcaggtaatccgggatcaccgcgctgatatttttacccgccaccttacccaatcgggtttgcggcgcatgcatccacaatccctcgttggcgaaatcgagatcgatcgccaaatcggtcagcgccggccagcccggttggaactggaaggtggcgtgacgtagcggtacgaaaacttcaaactgcccttcgtttttacgatacgggaagtgctgcggatcgccggaataaatcagcgtagcgttatccacctggccgccctgaatggcgccgctcaggtagtccaccagatgcttgcccatcaacggttccgggaaatagcgccaggcgtcggcgccgtcatacaggcggatgcccgccaggatgttcagccacggatcgcccttggccggctgctgataacggaaatcaccgttgacccacagcgacttcgccttgacgtccagcccctgactcgccagctcccagccctgatcgttgtaacgccaggtcagcgcgccgcgcgcgctgctgatttcaagcggggcgcggaacatgtcgccgtaaggcagggtgctgtcggtgagccccagcgtcaggcggccgttctccaccccgccgctcaacgccccggagaagtggttaacgcccggcagcagttcccaacgctgccagctgacatcgcgccacagcgcctggaaacggctcttttccggctgcttgagcggaatgtccagcgccagcgcttccaattgcccctgcggctgcagatcgttccagcgctcgagcacgtccgggctgaggaaggagaaggtcggcaacagcgccgacagacgctccagctgaatatcagtcgcgcgcacacgcagttcttcattctgcgccggccccatgaattcggtgttttccggcagccacagcgcggaaagcgcgccctgcggccaggcctggccgtcggtgctcaaccgcagttgcggcacgtcgagctgccaaccggtgccctggcggcgcagcgacagcgccagattatccacgtccagccggtgctgcgcggcgccggtgtcccagttggccgccccttgcttgagcaacgcatggccgccggcgatctggccgttctgcacctgcagccaggcagccaggctgaagtcggcgctttccagcccggtgttggcgcgcagccagcgggtaaaccagggtttcatgtcgatgttatcggcctgcaggtagaccgtgccggtatccagcaggccttgattgtcacgcaggtccatgcgcagctgcaccacgccgtgctggccattcagcgtcgacaggctgatctgcccctcggcgcggtggcgatcgcggccgttgagccaggtcagctggggaatgtcgaattcggcgcgcgcgccggcgggcgtcaggaatgaaatacgactgtcgcgcagatcgaaatggtcgagctggcgcagcatcagatcgctgattttaccgggttcaaggccatcgccctgccgatcgccgcccagcgtggcgttcaaatcaagccggaattgatagaaggtcagatcgcggaactgccagcgccagtgcaacagcgactgccacacatccagcgccagcgtcacgcgctcgatatgcacatcgcttttgggcagcgtaacgctcaggttacgcacttcaagctgcgggccgaaggtttcccaactgccctgtaggaaatccatctgcacgggcacgccggacagcttctccacctgcgccagcagttggggacggtagtcgttcagcttcggcagcatcaggcgcagcccgctgatcagcagcgccacaatcacgattagggtggcgcctgttgctaacagaatcccaggcagtcgcctcacgcagttctccttgctccgctgcctggcaacgggaatatctatgcactgacgggcccggcgtgccgggcccctaccgatgtcgggcgggctacatcatgacgacgtcgaactgctcctggctgtacaacggttcgatctgcaccttcacctgtttgccgacgaaaatctccacttcggccagcgcatgcgactcttcgctcttcagcgcttcgccgaccgccgcagaggcgtacaccaggaagcgatcggaatcgtaagcgtgatgcacgcgcacaatctcgcgcaggatctcgtagcacacggtttccaccgttttcacggtgccgcgcccattgcaagtaggacaatcgtgacagagcacatgttcaatgctttcacgcgttcgtttacgcgtcatttcaactaagcctagctgagagaagccgttgatcgtggtttttacccgatctttactcaacgcctgctccagcgagtgcagcacccggcggcgatgctcttcgttgttcatatcgataaagtcgatgatgatgatgccgcccaggttgcgcagccgcagctggcgcgcaatggcctgcgtcgcctcgatgttggtattgaagatggtttcgtcgaggttgcggtggccgacgaaggcgccggtgttgatgtcgaccgtggtcatcgcctcggtctgatcgatgatcagatagccgccggacttcagctccaccttgcgctccagcgcgcgctggatctcgttttccacatcgtacagatcgaaaatcggctgactgccggtatagagctcgagcttgttggtgatgtccgggatgtactcaccggtgaactccaccagcagatcgtgcgtcagccgcgaatcgacgcggatgcgatccagcgccgcgccggcgaaatcgcgcaagatgcgctgcgccaacgccagctcgccgtacagcttgtatttggtctggttgcgcttcttgcgctccatcaccttggtccacagccgtttgaggaatgcggcgtcctgcgccagctcttcctcgccgatgccttccgccgcggtgcggatgataaagccgcccagctcgtcgcagtgcggcgccacgatcgccttcaggcgctcgcgctcggcttcgctgtcgatgcgctgcgacacgccgacgtgcgccgcacccggcatgaagaccagataacgcgaaggcagcgtgatatcggtggtcagacgcgcgcccttggtgccaagcggatctttcaccacctgcaccatcaggtcttgcccctggcgcaccagctcggcgatgtcgcgcacgtggaagtttttccgctcatcgccggcgacgcattcggtatgcggcatgatgtcagaggcgtgcaggaaggcggccttatcgaggccgatgtcgacgaacgccgcctgcatgcccggcaggacgcggctgacgcgccctttatagatattgccgacgatgccgcgtttggattcgcgttcgatatggatctcttgcagaatgccgccatcgatataggcgacccgcgtttcagacggtgtgatattaaccagtagctcagctgtcatgccttctcctcagagccggtcgataatggcagcgcccatcaaccggttcttacatcacgtaatgcgacaaaattactgagcagctcatgtgtttcgaccagcggcagaccgaccactgcgtgataactcccggttatcgttctgacgaaacaaccaccctttccttgaattccataggcgcccgccttatccatcggttcgcccgtagcaatatagtcgcggatatcctgttgtgacaggctgcggaacgtcacgtcggtcaccaccagctggcaacgcacgtcgtggcgatcggcgatcgccactgccgtcatcacctgatgctgcttgccggacagggccgccagcatgtccgccgcatgggcttcgtcgcgcggcttctccagcacccggccgttgagcaccacgatggtgtcggcgcccagcaccggccgatcttcctgcgccagcgccacgcccgctttggccttgtcctgcgccaggcggcgcacataggcttctgcggcttcgccttcccggcgctgctcttcggtatgcgtcagcagaatgtcgaacgacacgcccagcagggtcagcagttcacgtcgacgtggggagccggaggccagataaagcgaagtcattgatatacccttactgtacggcgaactgacggcggattttacgcatcaacaggaataaccacggccacaaaatgccgtttaccacactactccagaacacctctgggcggaaagagacgttgatcactaaaaactcagcccagaacaccaccacatccatcgacagcgacagcaacacgacgataagcgcctgttgccacagcgccatattgcggaacagttggaatttgaacgccaccagataggcgatgatgcccagcgccagcgcgcgcacgcccagcgtggaaccgaggatcagatccatgatcagccccagcacgaagccggtgccgacattaacccgatgtggcaaagccatcacccagtagatcaggatcagcaccagccaggaaggccggaacatgtagatctgctccggccacggcatgatttgcagcaccaacgccaccaggaacgacagccagattatccagcgcccgtggctgcggtagctgttcattgcaccacccccgccgccgcaggctgaacctgaggctgagcagacgccggagcgccggattgcggcgccgcaccagcggccggggccggcagctgcggcccgactgaaccggccggcggcagcacctgcggcatcatctgcatcaggcgctcattggccacgcggtgtacttcgtccggcggcagcggcatgtcgccgttgcgatcggcgccccacagcagcagcaggtagcgcaaacgctgcagaccggcggttggccgcgcctgaatcacggtgtaagcgcgctggttgtcgaccttgaccgaggagaccaccgccaccggataaccttccgggaagcggccgccgaggcctgaggtcaccagcacgtcgccaacgcggatatcggtgttgttcggcaggtgttccagctgcagatcgtcggcgcagccgctgcctgcggcgatcacccgaatatcgttgcgcagcacctgaatcggcagcgcgtgggaggcatcgcagatcagcagcacgcggctggtgaccttcgccaccgccaccacctggccgaccacgcccttgtcgctgatcaccggctggccttcatagacgccgttgtccgaccctttgtcgatcaccacctgatcgctatacggatcggaaccggtggagatcacctgggtgaccatcttgtgttcgtcctgacgcagcggagaacccagcagctcgcgcaagcgggcgttttcctgcttgaattggccaagaagaagaatatcgctgtttttcagcagcagttcctgccgcagagcgcggttttccagctccagctgttggcgggtggccagcgtctctgacacgctgtccaaaactttacgcggcccgttggccagaaaatagaaagggctgactgcggtgtccatgtagttgcgtatcttcacgaacgtgccgagccggctgtcggcaacgatcaggccaatggccgcaatcaccgccaaaaaaagtcgcagttgcagggaaggccccctgctaaaaatcggcttcataaattatgcgagttcctcgacaacagaaagaggaaccgtacccgattctcgctgtgcgcattcatccgatacgattcctccttccaggggctgactattcttcgctgaacaaatcgccgccgtgcatgtcgatcatttccaacgccttgccgccgccgcgcgccacgcaggtcagcggatcttccgccaccacgaccgggatgccggtttcttccatcagcaagcgatcgaggttgcgcagcagcgcgccgccgccggtcaataccatgccgcgttcggaaatgtcggaggccaattctggcgggcactgctccagcgccaccatcaccgcgctgacgatgccggtcagcggctcttgcagagcttcgaggatttcattggagttcagggtaaagccgcgcggtacgccttcggccaggttacggccgcggacttcgatttcgcgcacttcgtcgcccggataggcagaaccgatttcgtgcttgatgcgctcggcggtcgcttcgccgatcagcgagccgtagttgcggcgcacataattgatgatggcttcatcgaagcggtcgccgccgatgcgcacggaagaggagtacaccacgccgttcagcgagatcaccgccacttcagtggtaccgccaccgatatccaccaccatggagcctgtcgcttcggaaaccggcaagcctgcaccgatcgccgccgccatcggctcttcaatcaggaacacttcgcgcgcgccggccccttgggcggactcgcggatagcgcggcgttcaacctgggtcgcgccgaccggcacacagaccagcacgcgcgggcttgggcgcatgaagctgttgctgtgaacctgtttgataaagtgctgcagcattttttcggtcacgaagaagtcggcgatcacgccgtctttcatcgggcgaatagccgcgatgttgccgggggtgcggcccagcatctgtttggcgtcatgaccgacggccgcaacgctctttggggagccggcacgatcctgacgaatggcaaccaccgaaggttcattcagtacgatgccttgccctttaacataaatcagggtattggcggtacccaagtcgatggacaagtcgttggaaaacatgccacgaaatttcttaaacataacgaaaggataatcctgcaagctgggggcggaaaataaaatccgcctactttaccaaccacacgaagcagcgacaaggcgcaaaaacgttctacttcggtgaaaaatagtctgtattgtttctgctcgaatgcacggaaattggatgaggcctgaattccctgaacaaaggctcagtttaccaccctgtcaacgcacgaaacggcgtaacacagctcataaaatctaacatattccctgattgccgccgatggtaagcacctaccaacgccaaccagataaaagctgacaagagcctatctcaaataggcgtcattgtcgcaggcagattggagaaaactccaaaatgacgggtgacatggcccagatggatccggcgctcattctacgtcaatttttgtccggcaatcagcttaaacgcgataacgacgtgaatattttttacgccccgcgtcgatcggttccggcgacgcgaaaaagtcgccctgcccgccatggatcccacgctctttcagcgtctgccattcgttgcgcgtacgtacgctggcggcgaacacctgcgcgcgcgtacccgcgcaggcgccggtcaggctctgcacgaacagctggttttcgtcccgcttatcgatgctccgcaccaaccccgggtggagcttgacgatctccacctgcagcgacttgatataggacgtactgaccacggttaaacccgctttggacaccgccaggcggcagcccagccctgacaacagcctcagcaccggacgcaaacggtcgatatgttgacacacatctgcctccgcaagttcaatcagaattcgtcgacgctgacttttttcgcactgcaacagcgtatcccgcagccagcgctggaaagagcgctgcaaaatcgagtctacgcacagcgggaacgccagcgtttcctcgggccactgcgccaacaagggaatgatgcggctcacctgttggcgatcgtaactctccgccaaccccagctgctgcaccagcggcatatattccgccggcagcaattcctgggtgccgtcatagatccggctcatgatctcgcgatggtgcacctcgccttccacggtcaccgccggtttctgatacagccgcgggccgccgcgcgccagcacctgttccagcagcgtgcgccacttgacgctgccgcgccccttttccggcacctggctgtcgtacacataccacccgttttcgccctgcagcgtagcgtggcgcgtcgcctgctccgcataatcgatcacctgctcggtggtttgaccgctgcggtacgccacgatgccgatgtgcaggaaggcctcgcgatcgatcagcgccgtggaaggcaaggcatcgatggcgttgaccagctgtgaagcgatgccgtcggcctccttcagggttcgatgcggcaacaacacggtaaaatcgctgtggaagtagcgcgccagcagcgccgacgggtagcgcatcacgaaggtagacagcaggttgaccagcgaatacatcagctcctgcaccgccacgctgccgtgcgtctcgcgcagggtctcgaaatcgggcagccgcaccatcatcacgatgccgtgcgagccttcatcttccaactgagtggtcaattggttatcgaagaacaggcgattattcagcccggttttggcgtcctgcgcggcgaaggcgcggatcagcgtatcgacccggctgcgctcttcccgcgcttccgccagatcggccagcaggcggtcgagcgcgccgctgacgttggccggccactcacgcacgtcgccctgcatgacgttttcacgctcgccgttcagaatgcgccgcgcgcggcgttccagacgatcttcgccgtcggcctgttcacgcagccagcgcaggctgaacagcaaaatcaccaccatgacgacgatcgacagcgtgacggcggcggtggattgcagcgtacgcacgtcgctggcgaagggatcgaggtaggtgatgtacagcgtgctgcccgggtgctgcaacagggggcgcgagacctgacgatagccgttcagcgcatcccagtgctcttttttgaccgtcggcaatttatagtcgagcagttggctggtcccggcctctatgcggatcgacacgatgccgagcgtgcgcatgacgatgggcaaccatttctcctgctcctgcggcggctcgctcagcatggcttgatcgagagtggtaaccagcgaatccaagcggcgctcctggcgatcctgggtaacgtaaaagaagctgtatgagcatcccatcagcatcaaaaacatcgccagtgcgaccaacagagtgatcaatgcagagagtttggtggtaaatcgcatccctgtgccttgtccgctatggttaagtgagtgtgcccctgtagccaaaaggagccgtccaaccctaacaagccttgccgaggaataaaacctgcaagcgccgtttttgtcctttatcaggacttgggccgcttattatgcatatagtcaaataaatgtgattcagccattgatagaaaagtgtaaacgagaggaagagtgacatgcgtgcactgttattggaacaacaagacgaccaaactctggctcatatcaaagatatcggcagcgatcggttgccggaaggcgatgttaccgtcgacatcaactggtccagcctaaattataaggatgcgctggcgatcaccggcaaaggcaagatcgtgcgcaacttcccaatggtgccgggcatcgatttcgccggcaccgtgcgccacagccgcgacgatcgcttcaaagaggggcaaagcgtggtgctcaccggctggggcgtaggcgaacaccactggggcggcctggccgagcaggcgcgcgtctccggtgagtggctggtgccgctgccgaacgggctggatgagcgcaaggcgatgatcatcggcacagccggctttaccgccatgctgtgcgtgatggcgctggaggaaggcggcgtgcacccggacgacggcgatatcctggtcaccggcgccagcggcggcgtgggcagcaccgctatcgccctgctggcagcgctgggttaccgggtgaccgccatcagcggccgcgacagcaataccgagtacctgaaagcgctcggcgccaaagaggtgatgtcgcgcgatggctatatcgacacgccgcgtccgctggagaaacagctgtgggccggcgcagtggacaccgtcggcgacaaactgctggcgcgggtgctggcacagatgaactataacggcaccgtcgccgcctgcggcctggcgggcggttatcagttgccgaccaccgtgatgccgttcattctgcgcaacgtgcgtctgcagggcgtggattcagtgcatacgccgctgcaccgccgccaaaccgcctgggaacggctggccggcattctgccggacagtttctatcagcaggccacgcacgaaatccccctcgaacaggcgccggccaccgccgccgcgctgctgaacaaccaaatcaccggccgcaccctggtgaaaatccgctgaccttctcccctcggcgacggggggagttcccgcttctgcgaaatttcatattttcccgcgccccctcgcttccggccggctttagcgccatgcttatttcatggagacccgtttgccgcttacaggcggcgggaatcagtcgcggagaacataagcatgaacaaacacccgaaattaaccgaggccgacgtcacgccggagagcgtgttccatcagcggcgcaaggtgctgcaggcgctcggcatcagcgccgctacgctggcgctgcctgccggcgcgcgggcggacctgctgtcgtggttcaagggcaacgatcgccccaaggcgccaccgggcaaagcgctggcattcagcaaaccggccgcctggcaggcgcagctggcgatgacgccggaagacaaggtgaccggctacaacaacttctatgagttcggcctcgacaaagccgatccggccgccaacgccggcgggctgaaaaccgaaggctggaaagtgcgcatcgacggcgaagtggcgaaaccgataacgctggatatcgacgatctgatgaagcgtttcccgctggagcagcgcatttaccgcatgcgctgcgtcgaggcctggtcgatggtggtgccgtggatcggtttcgagctgggcaagcttctcaagctggccgaaccgaacagcaacgcgcgttacgtagccttccagacgctgtacgatccggagcagatgcccggccagaaagatcgctttatcggcggcggcctgaaatatccctacgtcgaagggctgcggctggacgaggcgatgcatccactggcgctgttgaccgtcggcgtgtacggcaaaaccctgccgccgcaaaacggcgcgccgctgcgactgatcacgccgtggaaatacggcttcaaaggcatcaaatcgatcgtgcatatccgcttggtgcgcgatcagccgccgaccacctggaaccaatccgcgccgaacgagtacggtttttacgccaacgtgaatccgcacgtcgatcatccgcgctggtcgcaggccaccgagcgcttcatcggctccggcggcattctcgacgtcaaacgccaaccgacgctgctgttcaacggctatgccgatcaggtggcgtcgctgtatcgcggcatggatctgcgggagaatttctaagtgcgcctgacgcctgttcatatcaaatggctgaaagccgccctgcatctggcggcgtttttgccctttctctggctggtactggcggtggatcaaggctggttcagcgccgatccgtccaaggacatccagcattttaccggcaggatgacgctgaaactgctgctggccacgctgatgatcgccccgctggcgcgctacgcccgccagccgctgctgatccgctgccgccgtctggtggggctgtggtgctttgcctggggcacgctgcacctgataagctactccacgctggagctggggctgagcaatctcggcctgctgggcagcgagctggtgaaccgcccttatctgacgctcggcatcctcacctggctgatcctgctggcgctggcggccacctcgacgctgtgggcgatgcgcaaactgggcgccaaatggcaaacgttgcacaacttcgtctatctggcggcgatccttgcacccatccactacctgtggtcggtcaaaaccttttccccccagccgttcatttacgcactgctggcggtggcgctgttgggcctgcgctacaagaaattccgcgcctggtggcgctgaatcgcgcggcggcgtgcgtgattgtcgttgaaaaacgcaagccgccggcgggaactttttctgtgttccagcgctcatattcctgtcacggaaccccgagttggtcgatttggggttgaatatcttcgctgataagaccagtatttagctgcgaattgctacgatatcgttataatgcccgaccttgtttctgttctcagggtgaatttgccccttaacaggtgacaaatcggtaacatcgggttattttctacgatgatggttttattgccggagataccagcacaatggcggataagtttcacattttgcttctgaacggccccaatctcaatctgctggggacgcgtgagccggagaagtacggcagcacgacgctgacagagattgttaacggattggaaaaccaggcatccgcattggatattaccctgagccatctgcagtccaacgccgagcatcagctgatcgatcgcatccatcaggcgcgcggcaacaccgatttcattctgataaacccggcggcgttcacgcacaccagcgtggcgttgcgcgatgcgttgctggcggtgcagatcccgttcatcgagatccacctgtccaacgtgcacgcccgcgaacctttccgccatcactcttatctctcagacgtagcggtaggcgtgatttgcggcctcggcgcggatggctacgctttcgctttacaggcagcggttaaccgtctgtcgaaaacccactaattgctccacaaaaagagtacggaatcacactcatggatattcgtaaaatcaagaaactgatcgaactggttgaagaatcaggcatttctgaactggaaatctctgaaggcgaagaatcggttcgcatcagccgtgccgcaccggcgcaggcttatcccgtcatgcagcaggcttacgcgatgccggcacagcagcagccagccctggctaccgccgttgccaccgcgcctgcggcagaaacccctgcagcaccggcggccgtgagtggccacgtcgttcgttccccaatggtaggcaccttctaccgcaccccaagcccggacgcgaaagccttcgtggaagtgggccagaaagtgaacgccggcgataccctgtgcatcgttgaagccatgaaaatgatgaaccagatcgaagcggacaagtccggcgtcgtgaaagccatcctggtggaaaacggccagccggtcgaatatgacgagccgctggtcgtcatcgaataacgaggcgcccccatgcttgataaaattgttatcgccaaccgcggcgagatcgcgcttcgcatcctgcgtgcctgtaaagaactgggcatcaagaccgttgcggttcactccgcggccgaccgcgatctgaaacacgtgctgctggccgacgagaccgtctgcatcggtcctgcgccatcggtaaaaagctacctgaacatcccggccatcatctcggcggcggaaatcaccggcgcggtagcgatccacccgggctacggcttcctgtccgagaacgccgacttcgccgagcaggttgaacgctccggtttcatcttcatcggcccgaaagccgaaaccatccgcctgatgggcgacaaggtttccgcgatcaacgccatgaaaaaagccggcgtgccatgcgtgccgggctccgacggcccgctgaccgacgacatggataaaaaccgtgccttcgccaagcgcatcggttatccggtgatcatcaaggcctccggcggcggcggcggtcgcggcatgcgcgtggtgcgcagcgacaaagaccttgagcagtccatcaacatgacgaaagcggaagccaaagcggctttcaacaacgacatggtgtacatggaaaaatacctggagaatccgcgtcacatcgagattcaggtattggccgacggccagggcaacgccatctatctggccgagcgcgactgctccatgcagcgccgccaccagaaagtggtcgaagaagcgccggcgccgggcatcaccagcgaaatgcgccgctacatcggcgagcgctgctcgaaagcctgcgtggaaatcggctaccgcggtgcgggcaccttcgagttcctgtatgaaaacggcgagttctatttcatcgaaatgaacacccgtattcaggtagagcacccggttaccgaaatgatcaccggcgtggatctgatcaaagagcagctgcgcatcgctgccggtcagccgctgtcgatcaaacaggaagaagtgaagatccacggccacgcggtagaatgccgcatcaacgccgaagatccgaacaccttcctgccgagcccgggcaagatcacccgcttccacgcgccaggcggtttcggcgtgcgttgggaatctcatatctacgccggttataccgtaccgccgtactatgactccatgatcggcaaactgatcaccttcggcgaaaaccgtgacgtggcgatcgcccgcatgaaaaacgccctggctgaactgatcatcgacggcatcaaaaccaacgttgagctgcagcagaagatcatgaacgacgaaaacttccagcacggtggcaccaacatccactatctggagaagaagctgggtctgcaggaaacctaaggcagccacgcagcatcgtctgacgaaaggccggttaatcaccggcctttttcttttctcgcgcccgcctgattttttcgttcaaccgcgcaaaatagaatcaaatcttcacagataactttctcttcacatttatccagcccgccaaccacatcaccactctaaacataacaatctgtttttaaacaaaaaatatttaactcatagcttacaaataaatattagcaagggaaaaactcaatccatcgcatttttacacgctataagctttaacaaaattaacgtattaattacaaagcttgaccccgatcacatccgctcggtgatagcccgtgctattgtcgccgtcgatcgaatgcagcgcgctctttttctctttttatttatcctttttattgacttagatgagtaatgtcttaatgagccatgtaactgaatacgaccgtaagcccgtgttttccctgtaccaccgtgctgacatggaaaccataaaaagcattaaggaaaacgggattgagaagcttttgggcgaagtgaagaatttccgcgccaatgaggaaatgaaccgctttattcccgaacaggcacgcctggcagtaagctgggtgcgtctggcaaaaaacgaaaagctggatgtgcatgttcatccaatatcttcgctgtatatcatttgtgaaggggaagcgatcctgctgggagacggcgttgaccgccgggccgttccaggcgatgtcatctgcattccgccaggcgcggatcacggcttcatcggcgcgggcgacaacggctactgggggctgtcaatccagtttgaggagcgcgggctctatgaagatcccagcaagccgctggtgactttcgatcaagatccctacgcttactaccatcagcttaaagcgcataacgcccgctacatcgagcgctaccaggacaacccgatctttaccgcattcgccaaggataaaacgttctccgaggcgaaaaaatccttgttcctggactacctgcagatcctgtccgatcagttccaaaaaatggtgctgctgcgtagcgcactgtgtgaagacgttcgcttctcgcgtttcttcagtgaacatctgaaagaagaattcggccatgacgaggtgctgcgcaacagccgcgacaacctccaggttcgcgaagacgcgatctttgaagcactgtgcatctggttcaaccatcagatgatcacgctggataatctggaacaggctatcctggtgcactttgtcatcgaaggttcggctttcgtgttctataacaacatcaaacacgtgttcgatccgagcaaacagaaccatttcgaggatcactccgaattcgatggcgatcatcaggaagtggataaagcgttcttcaaggggatgaccgaagaacaattccagcgtgtcaaagccgtactcgataaagggtggagtatggttgagaagcagtatgcaagactggccgaactgatcgaagcataagacgggcaggtcatcaggagcggtcatgaaaattgttttattgggattcggcggcattgggcaagagacgctaaacgcgctgttaagtacgaccgagcgacgtggcagcgtcaatgaagtcgtgatcatctgccgaaataccgaaaagtattcagccgtttgcgaagatattcttgatggcctgctggcggaagcgctcttctcacgccataaccgaacgtctttacccaagattgttgtaacggatgactaccgccacatcgacggggctgacgtgatcctctgttgctatggcgtgccttcaacctttccgatgcatgaccgccaggcgttgctggacgatcacgtacggctcagcgaggccatttttagccgagccaaacccttcattgctcccggctgtcacatcatcaatgcggtcaatccggtggatagcatcagctattacatcgataaaatcctgctcgactctcgctgccgggtgataggcatcggcgccgcgcacaacaccgccaggctgctgaaaagcatctgccgcatttccgggatcgacatgcagcgcatcgacgcgcgtagcctgacagtctgcggcgagcacggcgccgggttggtgcccttgctcagccaggtaacaaccgacgagggaccgctgaaccagctactttcggcgcaggcgctggcgcaaatcgtcaccgatacccgcaatcaagggttggacatatttcacaaaatgcggcgccctcctaaatatggcccggccgcctccattcttatcttgcttgagcgcatcatccaacgggacgaaaccccctgctgcggttcggtctggctgccggaactgggcgtgttcatgtcctggccgctggctctgcgcgacggcgtctttacgccgctgtcgctgatgcccaatcaggatgagcaacaacaaatccaccaggcggcgctcaagttaaaaaacatcatccaaggttttagctgatgacgaccgatcaaaccagacagattttccgcgatctctacatgccgttacgccctgagtatcgttttctttcgccactgtacggggtgctgtggtgcaacaacgaactcgcggaaaagtattaccgttttcttggcgccgaacacccgatcggccaggtggcgcgcgcgttgttctaccgtactgacctggtcgagtttgacgtaagcaaagaggtgaagaatccgttcacctggttttccccctctacccttgcacggctggtggctttcatgagcagcccgcgtttcaccgacaatgatatcgcctcgttatatcagcatgtacgagatgaaacggactttcacgctgccattgagcagcaacatcggctttctgtgcaaatacgccggctttgcgacagcgtactgcaacagttcgaggacacaaaagcgcagatcgcagccgcagaacgcgaagcgctctccctaggcgcccatttgaaagcgcaagaaaaagcgctgaatcagatcctgcaacaggcggaaaacgccgttaaagcgcagcaggtgccgatccaacaatgtcgagccgcgatcgccgcgctcaaagccggcaaaaaaacgctgggcaaaagcgctgctgagaataaagaggcgcagctgctggcgctcaatgccgaaatcaccgagctggaagcacgcctgaatgcggcgcagcaagaagccgtgcatcaagccggcctattccccgcctggcaaaacgcgcaggccgccgtcgaacatgcccgccagcaaaaagatgaagccaccttgcgcgccagcatgctggcggaaaattttaccgaaagcaccgtcgcacggctgcaaaccgagggattcagcgctgacttcattgcattgcatctgcctttcaacaagtatcaccgctatctgccgcgacgtgtgcaggattacgtcggtatccactgtgccgatcgcgacagcttgctggccaagttgcacaatttatgtcgtttactgatcgcggccagccgcaccgccgagcacgacagagaggtgtttcatttgctcaacgcggcgctgtggctgaaatgcaagggtaacttcggcaaattgaccgcctacatgcagcaactgcgggaactgagcggggagctgttcggcgaaacggcgacgggcgagacgcacttccccgatcgctgccatgactattacgatcgcgaagtgtacggccgctattttccgccgctgtgcatcaccaaaacctgccgccccgcgccggattctgacgtctcgttctcagattgcggggagagttcgctgcgcaacttcatcaatgtcctggtgaaaaaccaagcaagcgcgcagcttgacgccggaatactcaaacgcagcggcctggctgtcgatccgcgcgtcatcgcgttctatgaaaaaaaccctcgtttggaaacgatcagaagccaggaagtacataaccagtgggctgaaattgcctcatcactcaatgcgcgcgacaaccgaatcaaatacctgacgccaggtaaagacgcctattgcgagttggccgccggcggcaacaacatgcagcatatgctgcaagcgctattgggcgaagctgatatcaccaccatttgccgccgaatcgcctccgcttccggcatcgatattcgttgcgatctcagcgacttccacccggaacggcacgatctggaagacttcaccaacgttgttcgccttgaattcgacggcaaatatgtctttcactggtatttcctcaaacagcatttccgctgcgcttcggcagatctgttcaacgaagaggaaaattatgtacgccaggcactcgccatgctgaatgacgagatgaaacagggccgtctgaatcgcgaccagttccgcgcactgctcagtttccatctgaaagagaagcccgtggcgcaagtcaaaatgatattcgacagccttggcgctaccctcgtcggagatgaaatgacgttcttgatgctgggtaaattgaactccgtcgattccatgttcgaatactgcatgaacgttctggcgattccaacgctggcgcatagcgcgccagtctcggcgactgtcgccgcgattattcaaggcatcagcccgcatccggttatcttcgatcagcggaaaaatctcatcgcgaggattagagaaaccggagtgacgccgttactcactctggctaaccgatgggaaaaggaaagtttggaaaaggtgtaatacactcggttcaacagacgacgagcaacatttaaggagaaaccgccttgaggtcaacattcatcccttatttcccaaaagaaatatgggttatctttatcgggacgtttttgacgcgcgcctgctttttcatgatttggccattcattaccattctcatgagaaataactacgcgatgacgccggtggaaatcggcgtcatgatgagcgtatcacttatcgtgtctatttctttcggctatctcttcggtggcgcatcagacaaatatggccgtcgcacgttgattattcttggtgcaatcgccgctatcatttcatttagcgtacttgcgttggccaactcaccggcgtggtattttgtcggtattttactcaatggcatttcgcgctcattgatcgaacccgccagcaaagcggtgatcggcgatattctccatgacaggcaagagcgagaacgcgcgttgaacatccgctacttcctgatgaacgtgggcgcagccgtaggcccattagtgggtgtcgctctcgggctgacggcgcagaaggctaccttcttcgtcaccgcattgtcgttcctttgctatttgctgctggtgctcgcggtattcaaagcggggcacggtaaagaaacgcgcaacgccaccttctcattcattggctctttgcggattatctggaacgatcaggcgttcaaggtgttggtagtcgccaacattttggtgatgctggtctacgggcagatcgacgtgacgctgccgcaatacctcatgatcagccaggtgtacaaccccgaatacctgctcagcgtgctgatattcatcaatgcagccacggtgataacgctgcagtatttcaccgagcgctttacccgccgcatgtcattggcactgaaaaccagcctgggcgtgttctttctcgcgctttcacaaattgtcttcctgctggtttccagtgaaagctggctgctgtggttggtcgccatgttcctgctcagcctcggcgaagtcatcctgttccctacgctcaatatacaaattgatcgtatggcgccggctaacctaaaaggggcttacttcggtgccgccacgttttacgaatttggcctggcgctcgccccttttgtcggcggtttgctgttaaaacaaggtggcggtggcgccctgtatgccgtgatgttctttttatgcatcggcgtcatcgttctttatactatttcggaaagaatatctgagaaaagaacgataaccgcgtgacattgttaacccgctaattaacgccgcccttgtttaaacgtattaacggggcggttttatcgtgatattaatcacagtaaataaatagcgaaggatatgcaggtcattatttaatcgaatgatttatttaatgctaaaaaataaaataaatctatttacatgaatgattaggagatgttataaatttgtttattgcaggcgtgtagctcagtggtagagcgctgtgtcatacttcacagaggtcacctggttcgattccggttgcgccaaccaatataaaacccattccttttcccattctctttaattattttctcatcgaaataaaccggtaaaaatttatatatttacccccctcttttctttccatcgccccgttgcgttcaccggaaaggtgaataatttattagccaaacgccgcacattccgtacaatcctgttccttcatctgttcttgtcacaagccatcatcgtaaacctatgggggacactgatggacaaacgctttattcaggcgcaccgcgaagcgcgctgggcgctggggctgacgctgctctacctgctggcctgggggctggcggcctacctgccggacagcgccatcggcgtcaccggcctgccgcactggttcgaaatggcctgcctgctggtgccgctgctgttcatcggcctgtgctggctgatggtgcgcacggtgttccgcgacatttcgctggaggaccgcgatgcaaactgaagtgatcctgccgctggtcgcctacctgttgctggtgttcggcctgtcggtgtacgcctatcggcgccgccagaacggaaacttcctcagcgaatatttcctcggcaaccgctcgatgggcggctttgtgctggcgatgaccctgaccgccacctacatcagcgccagttcgtttatcggcgggcctggagccgcctacaaatacggcctgggctgggtgctgctggcgatgatccaactgccggcggtgtggctgtcgctcggcgtgctgggcaagaaattcgccatcctggcgcggcgctacaacgccattactctcaatgacatgctgtatggccgctaccaaagccgcctgctggtgtggctggccagcctcagcctgctggtggcgttcctcggcgccatgacggtgcagttcatcggcggcgcacgcctgctggagaccgccgccggcattccttacgacaccggcctgttgatcttcggcatcagcatcgcgctgtacaccgccttcggcggcttccgcgccagcgtgctgaacgacgccatgcaggggctggtgatgctgctcggcaccgtgctgctgctggtggcagtgatccatgccgccggcggactggacagcgcagtgagcaaactgcagcagatcgatccggcgctggtgtcgccgcagggcggcgatcagatcctcagcctgccgtttatggcgtcattctggatcctggtgtgcttcggggtgatcggcctgccacacaccgccgtgcgctgcatctcctacaaggacagcaaggcggtgcatcgcggcattttgctcggcaccgtggtggtggcggtgctgatgttcggcatgcacctggccggcgcgctcggccgcgcggtgttgccggatctcaagatccccgaccaggtgatcccgacgctgatgatcaccgtgctgccgccgtacgccgccgggatctttttggcggcgccgatggcggcgatcatgtcgaccatcaacgcccagttgctgcaatcctccgccaccatcatcaaggatctctaccttggcgtgcgtccgcagcagatccacaacgagcggctgatcaagcgcttctccagcctgaccacgctgatcctcggcctgctggtgctgctggcggcctggcgcccgcctgagatgatcatctggctcaacctgctggctttcggcgggctggaggcggtcttcctgtggccgctggtgctgggcctgtattgggaacgcgccaatgctcagggagcgcttagctcaatggtgtcgggtgcggtatgctatacgctattggccagcttcaacctgcaaccggcggggctgcatcctatcgtgccttcgctgttgctcagcctgttggcgttttatctcggtaacgtcgtcggcgaaaagcgccgggcggcgtcatcattaccctcttgaagagaattgctatgccttggatccaactcaaactgaacaccaccggcagccaggcggaagacctgagcgacgcgctggtggaaagcggcgccgtgtcggtgaccttccaggacacccacgataacccggtgttcgagccgctgccgggtgaaaccctgctgtggggcgataccgatgtgatcggcctgtacgacgcggaaaccgatatgaccgaggtggtggcgatgctggaacagcacccgctgctgggcgccggtttccgccacaagatagagcagctggaagacaaggactgggagcgcgaatggatggacaacttccacccgatgcgcttcggcgagcgcttgtggatctgcccgagctggcgcgacgtgccggatcccgacgcggtcaacgtgatgctcgatccgggcctggcgttcggcaccggcacccacccgaccaccgcgctgtgtctgcagtggctggacggcctcgatctggccggcaaaaccgtcatcgatttcggctgcggttccggcatcctggcgatcgccgcgctgaagctgggtgcagcgcgcgctatcggcatcgacatcgatccccaggccattcaggccagccgcgacaacgcgcagcgtaacggcgtctcagagcgtctggagctgtatctgccgaaagaccagccggcggatctgctggcggacgtggtggtcgccaacatcctcgccggcccgctgcgcgaactggcgccgctgatcggttgcctgccgaaggccggcggtcatttggggctgtccggcgtgctggccagccaggcgagcagcgttgcacaagcctacgaagagaagttcacgctcgatccggtcgccgagcgtgaagagtggtgccgcatcaccggccgccgtaagtaagcgtcacggtatattgctccctcatccaccggccccgcgccggtggattttttttgtccggcgatcgacccacgggcaagacaaaattttatgcaattttttgcctttcaacgatggatcgccctgacaatgcgccttccagacaggttatcccggcaaaaatagcgggcgaatgcagataatatcctgcgcaaaggcgaatattttaccgcacacaaaataagcacttttcgtcaactcattgtaaaatatatacaatatttttatgaatcactgcgcagcgcattttttgccctaatagcgagccaattggttaaagtttggcctttcatctcggcgcaaaaatgcgtaatatacgcgcccttgcggacacagtatggtcactctttgtctatgcgcattggacaccaccagcttactaattgcctgattgcggccccgatggccggtattacagatcgcccgttcagaaccctctgtcatgcaatgggtgctgggatggctgtatccgaaatgctctcctccaacccggaggtgtggcggacggataagtcgcgtctgcgtatggtgcatagcgatgaaccagggatccgctccgtgcagattgccggatgcgatcctgatgatatggccgccgccgcgcgtatcaacgtggccagcggcgcgcagatcatcgacatcaatatgggatgcccggccaaaaaagtgaaccggaagcttgccgggtccgccttgttgcagtacccggatctggtaaaacggatcctccacgcggtggttgacgcggtggatgtgccggtaacgctgaagattcgcaccggctgggcgccagagcaccgtaactgtgtagagattgcccaactggccgaagactgtggtattcaggccctgacgattcacggccgaacccgcgcctgtctgtttaacggcgacgcggaatacgacagcattcgggcagttaagcagagtgtttccattccgattatcgcgaatggggatattactgacccgcataaagccagagcagtgctcgactacaccggggctgatgccctgatgataggccgcgctgctcaggggagaccctggatcttccgggaaatccagcattatctggacactggggagttgctgccgccgctgccgcttggcgaggtgaagcgcttgttgattgggcacattcgggaattgcacggcttctatggccaaggcaagggattccggattgctcgtaagcacgtgtcctggtatctccaggaacacgctccgaatgaccagtttcggcgcacattcaacgccatagaggatgccagcgaacagctggaggcgttggaggcatatttcgaaaatcttagcgtaaaaaaagagctgacagaactatgttcgaacaacgcgtaaattctgacgtactgaccgtttctaccgttaactcacaagatcaggtgactcaaaagcctctgcgtgactcggttaaacaagcactgaagaactattttgctcaactgaacggtcaagacgtaaatgacctgtatgagctggtactggctgaagttgaacagccactgttggacatggtgatgcaatacacccgtggcaaccagacccgcgcagccctgatgatgggcatcaaccgcggcacgctgcgcaagaagctgaaaaaatacggcatgaactgatactagtcagttaacgtgttgaaaaggcgctttatctcatttgataagcgcctttttcttttgagtaatctcatttccaagcgtactatccttcctcatctcattactgctcatcttacaaatggtattctggcaaccgcgttcaaagcaggatgcttgccaatcctcaaataagttaaagaacaataatcaaactcaataataattaatataattaattgttttaaaaggaaattaaattggaaaacaaacatactacagcagaagatttcgacgacagcagcttctggaataaaatcatgcgttacgcaaagaaagcaggaagcgaggtgattgagaaagcactttggctttactttgccgctcaacgtcctaataccccactgtgggccaaaacagctatctacggggcgttggcgtattttgtattgccaattgatgcgatccctgatgtcgtgcctgtggtgggatacacggacgatctgggtgtactcgctaccgctttagcttctgttggcatgcatatcgacgacgaagtaaaaaatgatacaaaggaaaaaatggctgattggtttgatgcaaaataatcatgacaatcaggcatatatgtcctagtaaaaaagcgttagctgatacccgtagttaacgtgttgaaaaggcgctttatctcatttgataagcgcctttttctttggggcacgcccgatttgcaggcaataaaaaaggccgcagcgcggcccttggggtaaagcggagaccttactcggtcactttgttcttgaggctttccgccccttgcttggtcttgtcccaagccttctccgatccctgtttggtggagtgccaggccttttgcgaaccttcgctcactttgctgccgacgctgtcgctcttgccttcggcggcatgcttggctttcagcttcagctcttcacccttgtcctgagactggtgcagcttttctttggcggtatccgcccctttgtgcgcctcggcgacaacttcgttgctggcgtgagcggcggtgtcggtcgcggtttcagcagcgaacaccggggaagcgagcagcagtgcagacaaggcaatgattgattttttcataagtccctcttttctcagatacgtgccattcgtcatgaaacaagatggcatgaaacaccccttgaacgatttaagaataggactaaaaccaaaaaaatcgatataaaatttcattacaaatcattttattgattttttatgccaacaagcagcacacgcagggaaagcgcacgaaaaagttaaatttttcctgtcataaaactataatttgtacgaatttttaacaagctccaacagggatggattctatggttgccgcgatcattatcggcatttttatcatcagcttcctctacgcacactcccgcggcaaagagaaacaaaagcttacccgtcagctgttcgatcactccacgtttatggggccgatcaacatgtttatgaccggtttctcgcgtttgcccgccaaacagccctatttcgacgaaaaaggcttcccggagctgcaaacgctgaccgacaactggcaggtgatccgcgaggaagccgtgcgtttgcaggatcacatcaaaaaggcgcagtcgcacaacgacgccggcttcaacaccttcttcaaacgcggctggaaacgtttctatctgaaatggtacagcgacagccacccttcggcgcaaacgctgtgcccgaaaaccgtcgagctgctcaaccgcatcccatcggtcaaggcggcgatgttcgccgagctgccgcccggcagccatttgggtaaacaccgcgatccttacgccggctcggtgcgctaccacctggggctgatgacgcctaacgacgatcgctgcttcatcgaagtggacggcgagcagcacagctggcgcgacggccaagcggtgatcttcgacgaaacctacgtgcactgggcgcaaaacgccaccgaccagacgcgcatcattctgttttgcgacgtcgagcggccaatgaaatggcgctgggcgcaggcggtcaaccactgggtcggcgctacgctgatgtcggcggccagttcgccgaacgacgatcaggaccgcaccggcggcatcaaccgcatcttcaaatacgtcaacgcggtgcgcgacgccggccagcgcctgaaggcgcgtaatcgccgcggttactacctgctgaaatggctggtgatcgccgccattttcgccgccatcatcctccccagcctgtaaaccgtcgccaatcgtcaatccagaggcaatgcgaatgagaatattcgcatgcctctcttcctctgaaccccgtaccctgtgttaacatacgcattcctagagccgcctccgctggccaacagctatccctccgaagcctgatagcagcgcaaaccgcccttcgaatgtaaatgtttagtcaattatggaattctgactaaaccctggccgtccccgggtgtctgagtcgttgtatcgctatcgagtggatcctttatgcgctacaggttgctacccccctaacgcataaacgagctgctatgaaacgccaaaagagatttcaactttccttgctgcacccgcgctactggctgacctggttcggtctggccctgttgttcctgctggtgcaactcccctacccgctgcttaaccgccttggcgtatggatggggcgcacctcgatgcgctttcttaagcgtcgcgtcgccatcacccgtcgcaacctcgaactgtgcttccccgagatggacgaagcgcagcgcgagcgtaaagtagtgggcaactttgagtccctcggcatgggcctgctggaaaccggcatggcctggttctggtcggataaacgcgttaagcgctggtttaacgtctccggcatcaaccacctcaaaatggcgcagcgtgacgaccgcggcgtgctggtgatcggcgtgcactttatgtcgcttgagctgggcggccgggcaatgggcctgtgccagccgatgatggcgatgtaccgcccgcacaacaacaaggcgatggagtgggcgcaaaccaagggccgcatgcgctccaacaaggcgatgatcgatcgcaaggatctgcgcggcatggtgcacgcactcaagcgcggtgaggcggtctggttcgcgccggatcaagattacggcccgcgcggcagcgtattcgcgccgctgttcgccgtcgatcaggccgccaccaccagcggcaccttcatgctggcgcgcatggccaacccggcgctggtgccggtggtgctgatccgccgtgaaggcggccgcggctacgacctgctgatccagccggccctggaagactacccgctcagcgacgaacaggcggcggcggcttatatgaacaaagtgatcgaaaaagagatcatgcgggcgccggagcaatatctgtggctgcatcgccgcttcaaaacccggccggtcggcgcgccgtcgctgtactgagccccattttccagcccggccgacgccgggcttttttgtgcgccgcgtttaaaaaatctgcggctcaacatttcgctttcctgtaatctccctctttacccgcacaggaaaggaaatgatgaaagctcaagtccgcattgctctggtcggtgattacaacccgcaagccgtggcccatcaggccatccccgtggcgctccagctcaccgccgcccatctcgacatcgacgtgcagccccagtggctaccgaccgaaaccctgacctcccccgatgtcctgcaagatttcgatgccatctgggtggtgccaggcagcccatattgtcacgacgacggcgcctttatggcgatcaggcatgcgcgggaaaacgacgtgccgttcctcggttcctgcggcggctttcagtacgccatcatcgagtacgcccgcaacgtgatgggctggcacgatgccggccatgcggaaaccgacagcggtggccggttggtgatcgccccactgagctgctcgctggtggaaaaaaccggcgacatcgtttttcagcctgacacccgtgtcgcgcaggcctacggcagcctgaacccccatgaaggctaccactgcaactttggcgtggctccggacttcgtcgccgaccttgagcgcttcccgctgattatcagcggccacgatgccgaaggcgacgtgcgcgccatcgaactgccggagcggcgtttttacgtcgccacgctgttccaatcagaacgcgctgcactgcgcggcgagctttcgccgctggtggtggaattcgtcaaagccgccgtctgctaacctgctacctccccgtaggatcgagccgcagcgagacagggttctcgttgcgtctttcatttcgggtatcactcggcatcaacgtttcacatttattatctcattaaagttaatccattaattgcccaataacggatcattcatcgcagtttaattgaaacgtcatactcctatgaaagttaacagcagaattacgaataaagaaatgcatgaaatcacaataagcttcacttcttattattcattattatttcttttataataatacaacataagagattctttataattttttatgattcagcctgttatctcttgcagagaagcaaccgaacttgcccgctgagataccactccgttatcgcttacgaaccgcctcagctccgccccccttttgccaaaaataaaaaataacaaataaaacaataaattacatgatttcgcttactaatatcacgaataaaagccagtcaatcgtgattaacacgccacaaaagcaatggcaaaaaaccagtttaaaaataaataaaatacaaatcattaacgctaaaatcattgcatttattataataaaataaaaccattaaaaatatttaatgtgaaaacaggccaacttaataatcaccttttataatgttcgagtgcttggctgcgactcactttatttaattcgattcattccttatttgtggaggtggttccgtgtccgcttattccctgacgaccgtgcaacaagccgtgtggctagaccaatctttaaaccccgatatccccttatataacgttgggtgtttatggcgcgtagagcgcgagatttcgctaccgctgtttcaagaagccatacggcaaatacagcaacaacatgatgcgttgcaaaccacgctgaaagaaacgccgcaaggcattacccaggaaacctgcgaccgggcctatatcgacctgcattaccacgatttttcgcatagacaagatgccatcagcctggcagaaacacaccttcgttctcaattcctgcagccttattcactgtatgacagcctgctttggcgctgccacctggccaaagtcagcggatccagcacgctatggctgcttgcttcccatcacctgatcgcggacggcacctcaatttccctgctgagcaaaatgatcatggagcgctataaacaattaaaagcagggataaaaaacgaagccccccactcgcgttaccaagacttcgtcatcagcgatcgcacctatcagcagtctccacgctacgagcgcgatcgtgatttctggttgaagcgtttcatcgacgcgcccccctccatgctggaacgccgccaaaatcactgtgggcaacaaacctaccccagccatcagataatcaagcggttgccacgcgagcgtttcctacagttggaacaatacgccgccgcgcagggcggttctgcaatgcatttttttagcgctttgctggccacctggttcgcccggatttggcaaaccgatcaattcacgctgggcgtgccggtacataaccgcagtaccgccgaacataagcaaacattgggcatgttttcctcgatgatcccactgcgcatcacggtcgattcacagcaatccttcggccacttactgcggcaaatcggcagcgagctgcgccagtgttatcgtcaccagcgttttcccattgccgaactcaaccgccagttgaacctgcatcagcaggagcggcgccagctgttcgacatcagcttttctctggaggtttttccgaccgacatcgaactggaaggcagccagttcaaggtggaaaacctgcaccacggtcaggaacagctgcccctcggcgtctacctgcgccattaccatccgggcgacgatccgctgttggagttcaacttcaatcaggcctggttcagtcaggaagacggtgagcgcatcgccgcccgcatgctgcacctgctgaacacgctactggacggcgatccggcgctgccgctggggcagttaccgctgctgttgccgcaggaaagacagcaaatcttccatcaatggaatgaaacccgacaaacatgggcagacatgccgcaaggcgtacatcaattcctggaacggcaggccgcgctgacgccagaagcgccggcgctgtgctacggggaccacgagatcagttatcaacagctgaatcagcgggcgaatcgattggctgcctttctcaggctgcagggattacagcctgacgatcgcatcgcggtatgcgtcaaccgcagcccggatatggtgattgccctgtacgccatcctgaaggcgggcgccgcctatgtaccgctcgatcccgactatccacaagaccgcctgcgccacatgctgcaagattgcagcgccagattcgttctgatcgacgatggcggcgaacacgcgctgcacccgctgcgcgatatcgccgtgccgcgattgcatcttcaacgtgagagccatctgtggcggcaagcgccggatggcaacccgccgccgctggccgccgatccacagcgcagcctggcttatgtgatttacacctccggctcgacggggaaacccaaaggggtgatgaacgaacaccgcggggtgatcaaccgactcctgtggatgcaaaaggcttatacactgacgccggatgatgtcgtgctgcagaaaaccccgttcagcttcgacgtctctgtctgggagtttttctggccgatgatggtcggcgcccggctggccatcgccaaaccgggcggtcaccaggaaccggattatctcagcgcctgcatcgcgcagcacggcgtgaccacactgcatttcgtcccctcgatgctgcaactgtttctgcgccacggcgatatggcgcagtgtgcctctctgaaacgcattatgtgcagcggcgaggcgttgccgctcgcgacggtacaacgctgcctgcagcagttgccgcaggcggaactgcacaatctctacggcccgacggaagccgccgtagacgtttccagctggcaatgcctgcccgatgatcctcgcccactggtaccgatcggtaaaccgatcgccaatacccagctccatattctggatgaccaactgcaaccgttaccgcccggcatcgccggcgaattgcatatcggtggtattcaggttgcccgtggttatctgaaccgcgcggcgctgagcgccgagcgatttatcgccgatcctttcagcgccgagccgcaggctcgcctgtataaaaccggcgatctggcccgctggctgccggatggcaacattgagtatctgggcagaaacgatttccaggtcaaaatccacggcctgcgcattgaattaggcgagatcgagcaacagctcagacagtgttcgggggttgaagacgccgccattctggcacgggaagacgaaagcggcggcaagcgcctggtcgcctatgtcatcgccccagagcaaacggccgacgccgccgaatggcgtcggcaattgcagcaacacctgccggactttatggtgccgtcctgttttatccggctggatgcttttccgctgtcgcccaacggcaagctggatcgcaaagcgttaccggcaccagccaacatgcaggaaaccgctgcttatgaagccccgcaaggcgagcaggaacagcagttggccgaactgtggagcgaactgctgggcacaacgcgcattggccgcgacgatgatttcttcgcgctgggcggccattcgctgcacgccattcaactgctggttaaactgaagcgacacgggcattcgttaggcattaaaacgctgtttgctcactcgacgctgcgcggccaggcccgtattctcaccgacggcgtgcccgcaacggctccagccacctccgaacccctgcagcagctgttgacccgtctgaatcaggccagttttacctttaaacaggtagagcgcctgaaccacgccatcacccccgacagcgtttggatgatccatcctgccgtcaccggttgcgatgtttatcgcgatctggcgaactatttagagaaagatttcaatgtgttaggcatcaacaattacaacctgttccaacagccgcacatcacttcgctacgcgagctggcggcgtattatctcggccatatgcggctgtcgccggcgcgccccgtccgtctgttgggttggtcgctagggggcctgatcgcgctggagatggccgctcaactggaaagccagggctatcgcgatatccaactgttcctgcttgataccttctaccgaaccccattccagatccgcagcgagccgggcatgctggcggcgatgctggccatgttgggtattgacggcgaggccgccgaccgggccttaaaggcagagccgacggagctggcattggcaaaacaaacgctcagcgcaccgttgcaacatgcacgcatcacgctgttcaaggcgaccgaagatgcaaatctgaatatcaccggcctgggcgatgagcgtgaactgctggcgattgccgacaatggcctgtcggcaatcggtcaacatctgcaggtgcatccgttgccctgcaatcatcactccattatcttcagccacgaggagataggacacgccttgcgacagtcatcgcgcacgccggcgatgctcggcaaccttccttgacgctctacggtctgcggcgccgttcgccgcagaccgcctcctcaccacatcagccggccgatcagtggcgcggccaccaccgtgataatgccggccaacatcatcaccaggctcgacactacgccctcctgcggccccagttcataggcgcgggcggtgccggcgccgtgcgacgatgcgccaaatccggcccctttcgccaggcggctgcgtacagccagccgcaaaaacagaatgtcgcccaccgccatgccgaacaccccggtgatcaccacgaacaacgccaccaggtccggttggccccccatctgcttggcggcctccagcgcgaacggcgtggtgatcgaccgcaccgccaggctgcgctgcacctcttccggcagcgtcagcaggcgcgccagccacaccgagctgtacactgccaccagcactgcggtcgttaccccggcgctcagcgacagccagtggcgacggatgatatgcaggttctcgtacaccggcaccgcgaaggcgatggtcgccggccccagcagccacagcagccagtgggtttcaccgatgtagtcctgataggagatgtgggtgaccaccagcagcaacaccagaatcatcggcgtcagcaccagcggcatcagcagcaacgtgcggcggcggcgatagagtttcttgttggcgaaatagagcgccagcgtcgccagaaaacaggccaggctaaggataaaatcattcatggcgctgcttccgccgctgcagccaaatctccagccgatacaccctgtccaccaccagcccggtggcgcccagcgtcagcatggtgctgactgcgatcaccagaaagatcttccagccctcgaccatcagcagctgggcatagttgaccaccgccaccaccgccggcacgaaaaacagcagcatttccgccagcagccagcgggagccggccttgacccagctcagcggcagaatgcgcagcaggatcagcgccagtagcatcagcatgccgacgatattggcggggagcggcaggtggaattgttgcaccaggcgatcggcgatcaggaacagcgccgcatacaacgccacctgaatcggcacctgcaaacgggtcagcagggagggggcaacgcggcgtaacgccagagacatgaaagatgacctcaaacaataattgacggcctacagtatacgcagccgggaaaccacgcctgaaatgaattaaaattatcgacatcatgccgtccgggaatagtttctcgccggtagcgtccccaaggagaaccctaacgtggatgtccgcaccctgcgctacttcgttgaagtggtgcgccagcaaagcttcacccgcgcggcggaaaaactgttcgtcacccagcccaccatcagcaaaatgctgcggcatctggaggaagagctggaatgcacgctgctgatccgcgaaggccgcaagctgcgcctgaccgacagcggccaggcggtgtaccagcgcggcctgacgatcctcgacgagttccgccagttggaggcggagctggaagacatcagctcggtgaaaaagggcgtgctgcggctgggcattccgccgatggtcggcaggcagatcgccgatctgatccgccgctttcgccagacctaccccggcatcgaattaaagatttccgagctgggcgggctgtcggtcgaacaggcggtgatgtccggtgaactggatctggcgatgacggtgctgcccttcgattcggcgcagccgctgacctttctgccgctgctgggccatccgatgtgcgtggtggcgccgcgcacgccgcagtggctcaaccgcaccagcatcaatatcgccgaattggccgacagcccgatcctgatttataacgaagactttgcgctgtacaagatgctgatgaaggcgtttcgcctggccggctttgaaccgcaaatcgcggtgcgcagcggccaatgggactttctcgcctcgatggtgcaggccggcgtgggcatcgccatgctgccggagccggtttgtcgctggctggacaaggaaaacctggtctggctgccgctggagccgcgcatggagtggaaaatcggcctgatctggcgccagggcagctacctgtcgcacagcgcgcaggcctggatcgcctgctgccgcgactactggccgccgctcaagtaaccaaaaaaagggccgcacaggcggcccttcaggacagaaataaagaggaaaacgtttattcctcttctgagatttacccttcgcgttcgatcagcagcgcttcgagcaggtcgagatcgtgcagcagtttttgcagcgtctcgttgctgattttctgcgtggcgcgcaggtgatacagctcgccgcgctcggcgcgcagcgccgtcaggcggaaacgtcgctcgaggttttccatcgccagcgcattctcgatatcgtctttcgacgcgatgcgccgccgcagcatgcccgtcacccgcgagctgacctctttcaacacctgcggatcgaggttttcttcggtatcggcaaccaggcgctcttccattttattcacgctctcaatcgccacttcggccgccatggcgatcgccatgcgctcttcctgcttgctggcgctcttgtcggtgacctgcacgccgcgcagcagcagcggcaacgccagcacgccgacgatcaacgacagcaggatcaccccggcggcgataaacaccagctgatagcgcgccgggaaggcggtgccgtcgctcagcaacagcggtatagacagcacaccggccagggtaatcgccccgcgcaccccggcgaacgacgccacccacagctcacgcgtgctgtaatcgccgaactgcagcggacgctttttcataaagcggttgctggccttcttcatcacccacagccaggtgaaacgcagcaccaacagcgcggcgtagatggtggccacgtcggcgaacaggtaccaggtctggatggtcggatccagctccgcctgcaggatggaggtttcaagaatgcccggcagctgcaggcccaacatgatgaacaccatgccgttgaacacgaattccagcatcgcccacacgctgttggcgcgcaggcgcatcgccagcggcgcgttgcggatcacgccggactggctgatggtcatccccgccgccaccgccgccaggatgccggaaacgccgatatgttcggcgatcaggtaggacgcgaacggcagcagcagcaggaacacgatctgggtcgccggatcgtcgccgctccagcggctcatcacccgcagcgatttactgtaggtccaggtgaccgccacgccggccagcaggccgccgatcgccactttgaggaattcaagggtcgcgccgcccacggtgaacaccatggtgcccatcgccaccgcgatggcgaacttgagcgacaccaggccggaggcgtcgttcatcagcgcctcgccctcgagcacgcccatgatcggcttggggatccgccctttgccgacgatgccggacagcgccacggcatccgtcggcgacagcaccgccgccagagcgaaggccgccaccagcggaatgcccggcaccatggcgtagatcagataaccgacgccgaccacggtgatcagcaccagcaccagcgccaggccgagaatttcacgcccgtgatgcaggaattcgcgcgtcggcgttttccagccgtcggcaaacagcagcggcgggatgaacagcaccaggaacagttcgggatcaaaatcgacgtgcagcccgaaatgcggccaggccagcagggcgccgatggcgatttgcatcagcggcagcggcacctggaacggcaacatgcgcgtcaccaccccggacagggagaccaccaggatcaaaatgaggattgtaaaaaagatttccatgctttccttagactctacgattcagacgacatcggctcagggcctgcgttggtcacgatagtagatcactttttttacagccgttaaagcttgttgtgcctttcaaaacgcggtgcagagcagaagaagacttatcttaagaagggaattgccgtaacaggctcccccgcccggcgggcgagggaaacccaagcggcttaaatcgcccagccgccggcgtagaacgccaccagcgccacggcgatcagcacggtgccaatgttcagcttgcgccattcgccggagaagatgcggccgatgaccagcgagctgaagcccagcatgatgccggtgacgatgttgcaggtcagcacgatgaacacggcgcacagcaggccggccatcgcgtcgacgaagtcgttgaagtccagcttggtgacattgctcagcatcagcaggccgacgtacatcagcgccggcgcggtggcgtaaaccggcaccagataggccagcggcgacaggaacaggatcagcaggaacagaatgccgaccacggtggcggtcaggccggtcttgccgcccgcggcggtgccggcggcggactcgatgtaaaccgcagcgggcgcggcgcccaccaggccggagaagatgctgctcagggaatccgaggtcagcgccttgccgccgttgatgatctgcccgtctttatccagcaggttggcctgcccggccaccgcgcggatggtgccggtggcgtcgaacaccgcggtcatcaccagcgccagcacgctcggcaacaccaccggctgcaatgcgcccatgatatccaggctgaagatcaacgatttgccgtcagcgtccgccaggctcggcatggcgaacagcccctggtatttcaccgccgggtcgaagatcaggccgatgatggaaatggcgatgatcaccagcagaatgccgccgggcacgcgcagtttctccaggccgaagatcaccgccaggccgaccagcgtcatgacgaccgggaaagaggtgaacgcgccgagcgccaccggcaagccatccagcgggttcttcaccaccaggccgacgccgttggcggcgatcagcagcagaaacagcccgatgccgatgccggtgccgtgcgccacgcccatcggcaggttgcgcaggatccaagcgcggatgccggtgaccgagataatggtaaacagcacgcccatcaggaacaccgcgcccagcgccaccggaatgctgatgtgctggcccagcaccaggctgaaggcggtaaaggcggtcaacgagatcgcacagccgatggccatcggcaggttagcccacagccccatcagcagcgaccccagacctgccaccaggcaggtggagacaaacaccgccgccggcgggaaacccgctttgcccagcatgctcggcaccacgatcaccgagtacaccatcgccaggaaggtggtcagccccgccaccacctcctgacgcacgctgctgccgcgcgcggaaattttaaaatagccatcaagcccgccggttggttttgcggcgtggttcgcttgagagttcgacataggttacttcccctgtgtttcatgaatcggcccgtcacagcaggcctgtaatctcgcccgcgcccgatcgccacgtaatcgtttacgtcacgttccgcatccctgcccttatgccacaccgccaacggcgatgcgcacccaggcaaacgtttaactcgcagcgcgcggtacgggtgatttatggtggtttattcaaggcaaacgattatcctgccttccctagcgtctaatcaactaaagatcgcggcaatttatgcagaaaacggcgggaatagcttctgcgcgaaaagacggggcgatccggcgcccctgccgacctgcttcacggcgagcttattgcgcctgcaccgccgcgggatccatatacatcaattcccagatatggccgtccaggtcctgaaatccatggccgtacatcacgccatagtcccgcggcggatgataggtattgccgccgccggcgattgccttgcgcaccagttcgtccaccgccgcccggctgggttgcgacaggcacaccaacacttcggtggcctgtttggcgtcgccgatcgggttcggggtaaacatcctgaatttgtcgtgggtcagcagcatcacgtaaatcgtgtcgctgaccaccatgcaggcggcggtatcgtcggtaaattgcgggttgaagctgaagccgagctgggtgaaaaacgccattgaggcgggcaggtcgcgtacgggcagattgacgaagatttgcgtagccatgggctacctccgatgaagaatgaccccatcgagtatagcccatccgcctaactcagcaggtcgtaagggccgccctgctccaatgcccgctggtaggcgggccgggcgtgaatgcgctgcaggaagccgcgcagtttcgggcaatcatccaacgcgccgcgcgccgccatcgcctccagcgggaagctcatctgaatatccgccgcgctgaagtcgttgccaacgaaccaactgcccttattcaggtgctgttcgaggaattcgcagtgcggcgcgatctgcttgtcgaggtattcccgctgcacgcctttgccgatcgcgccggccaccggccgcagcagccaggggatcggcggctggccgagacggctgaacaccagcttcatcaccaacagcggcatcagcgatccttcggcgtagtgcagccagtagcggtattgctgacgcgcgtggaagtcggttggcataaacatgccctgtgcgtcgtaggcttcctgcaagtattcgataatggcgccggattccgccagtgtcagatcgccatcgacgatcaccggcgatttgcccaacgggtggatctttttcagcgccggcggcgccagcatggtgttgggatcgcgctcgtagcgttgcacctgatagggcacgcccagttcttccagaaaccacagaatgcgctgcgaccgcgagtgattgagatgatgaacgatgatcatgacgacgctcctgtccgctgccacaccagttcgccaacctgcacgccgttgccgagctgcagcggcaccgtgcgcaacgtcagccgatcggcgttaaaggcgtaaaaacgtacctgacggctgcctatccaattggggaacgagcagccttcaacctgatgcaccacccgttgctcactttcttccacctgataacggccgaagtagcaaatcatattgatgaaggcggcatggatctcccgctcggatccctgcgtcaaatcgtcggcgacaaaacgcggccgcacggcgctgtatagctgcgccgccatcgtgccgttggcctcatagtggatgcgccccaacacctgctcgcccagcgggtaattgagctcgccgttctggtttttgaacgccgacgacaccaacgcccaactgccgataaacgcattcatcgtcatgacgcttctccggttaaggatcgtctgtaaagggtagtggcgattgttgccccgcgccagcggatgaaaaataatcaatttatttgacagagatactcaaaactctccgattttttattcacatccggtgcactagtatttaacacatcgagagacaacgggctctcacctaacaaacactctgaggaacgcatcatgaaaaacatcaaaatttttgctaccgctgcgctgctggctaccgcttctttcgctaccttcgccgctgacctgccttccagccaacctgctgcagacgcccagaagatcggcgtcgtcaccgtgagcggcgccgctaacctgagcgcgctggaaagcgaactggccagcaaagccgccgcttcgggcgccagcgcctaccgcatcgtcgccgccggtggtcagaacaaactgtacggcaccgcagaaatcttcaactgatcgtcggacagccaaccgacggaagaaagaagccccgcaaggggcttttctcgttttagcgggcgtcaaagcgcgccgccaacttctgcaggcggaactgttcggtgatgaaatcgacgaacacccgggttttggtcggtaagaatttggtggtgggaaaatagagatacacgctgccgcgatcgacataccagcccggcaaaacccgcatcagacggccgctttccagataaggcgccgcattcggcatgccgatcagcgcgatgcccaatcccatttccgccgcccgcgccgccgcttccggttcattgaccgtcatgctgaccgtcatccccggcgcacgctgctcattctgggcatttcgcagcggctggtggcgaatgcgcccggtctgcggcgaacggatgaaaatcccggcgtgttgcgccagttgctccggctccgtcaacggcggccgctgccgcaagtattctgccgaagcgaccaatacgccatgcgcgggcgccagctcgcgagcaatcatcccctgcgccaactcgatgccgccgcccagcgcagcgtcaaagttctcaccgatcagatccacctggcgattgtcgaaatgccagtccggtacaatcgccgggtactgcgtcaaaaacatcggcaacatcggcaatacgaagtgcagaccaaaggcggtacccatactgaccttcagcccgccggccgccgcgccgccgccgctgctcagccctttcaatgcgcactggatcgattgcaatccgccgctcacctcgccgagaaaacgctcccccgcctcggtgaggatcagcttgcgggtattgcgctgaaacagccgcacgccaaccaccgcttccagccgggtgacattcttgctcaccgccgccgggctgaggcccagcttgcggccggcggcggagaaactgccgttttccgcgctgctgacgaagcactccagatgtcccagcatgctttttccttatggattttaaactaatggttttaactgattatagctctttgtggctagtggccgtgcaagcgatctccgatactgaatgccgacactttaccctcatccactctggagaaataacatgaccacagcactcccactgcaaggcaaagtcgcattcgttcagggcggttcccgcggcatcggcgccgccatcgttaaacgcttggcgagcgagggcgccgccgtcgcctttacctacgccgcctcagccgatcgcgccgaagcggtggcgagcgccgttaccgccgccggcggcaaagccctcgccatcaaggccgacagcgccgatgctgcggcgctgcagcaggcggttcgccaggcggtgagtcacttcggcaacctggatattctggtgaacaacgccggggtatttacgctgggcggcaccgaggaactggcgctggacgacctggatcgcatgctggcggtcaacgtacgcagcgtattcgtcgccagccaggaggcggcgcgcaacatgaacgacggcggccgtatcatccacatcggcagcaccaacgccgagcgcgtgccgttcggcggcgcggcggtgtacgcgatgagcaaatcggcgctggtcgggttgaccaagggcatggcgcgcgatctcggcccacgcggcatcaccgtcaataacgtgcagcccggcccggtggacaccgaaatgaacccggacgccggcgagttcgccgatcagctcaagcagctgatggcgatcggccgttacggcaaagatgaagaaatcgccggtttcgtcgcctacctggcgggcccgcaggcgggttatatcaccggcgccagtctgagcatcgacggcggcttctcggcgtagcgctcaaagccccgcaaggggctttttttcattagctccccgacgaccgcttctcacctcgcacggcatattcggccttgaaagacaataatagaattagtttatgcgcaaaaatggaatagtttattgacgattctgttatttattcaccagcccgacgtctttatccttcgctccatcgtgtcgtaccggacacccttatttttcgaaccttcgaacacaggataaagatatgaaaaccatgaccaccgttatttcactcgctctgttttccatgctgtcgtttaacgccgcggcagaaagcgtgaccgcaaccggcagaacactggattccaccgaagccctcatcgctaaaaaagcgcaagaagccggcgcaagcggctacaaaattaccagcgcctacatgggcaatttcgtcactatgagtgcagaactgaaaaaataatgcgtttagcgataacgccgtgcatacggcgttattcattgccgcatgattaaggaaatcatcgccgggcgcctttttaaaaatcacgctggcgtacccagtaaacagaaaaaatgagccgttccctcaccggttattattcggcggcctcacgccgccaatttccggaggctcactttcattcgccctgcaatactccgttataaggatgagtcactgatgaaatcattgtatcgcctctccctcttgctgcccttgctggccgcagtgcccgcgcacgcggcagaatccgccgcgcagtcgtcagactggtatccttccgtttacggcgcaaaagacgaaatcggcgcggccaacctgctcacgcctgaggtcgtattacagtccgtgcagttggtaaaacaaggcaagacattgccattggcggtgcccgtcgataaagatttcccggcgttccgccaccgcagcttccgcttatataatattcagcctggtcagcaggacggtaaaacgcttggcccaaataaattcacctttaatgatgaattggtgaatgcctggaccggcgtcggcactcagttgaatggcattggccatatcggcatcgacaatgtttattataacggcaataaggcggcggatttcgtcaccgtagatggcgtaaaaaaattgggcgtggaaaaagtgccgcccatggtcacacgcggcgtcgtactcgatatgacggcttattataataaagcgatcgttccgggcggcaccgaattttccgttgcggatattcaagcggtgcttaaaaagcagggcatcagtttacgcaaaggcgacgttgtcttgttcaacaccggctggctggagctgattggcaaagacaataaaaagttcctggaagttgaaccgggcatcggcatggaagcggcgaaatggttggccgaccaaggcatcgtggccttcggcggtgatacctgggcctccgaagtttaccctaacccgaaaaatgacgaagagttcccggtcaaccagtacctgctggccaaacgcggcgtctataacctggagctgatcgacagccgcccgctggtgcgcacgaaaacctgggaattcctgttcgtactggggcaaccgctgtatgtcggttcaacccaggtcaatatcaacccggtagcaatttactgactggcgacaccgccgcagaaaatcagcggctaacgaacacaaaaaaccccgcctgagcggggtttttttagcgctgttgccaggcttagaacggaatatcgtcgtcgaaatccattggtggttcgttgctggtcgccggtgcgctgttctgcgccgggcgagactgctgctggccgccgctgaactggttgccgccctgtggctgctgaggctggccccaaccgccctggccgccggcagattgaccggccggtgcgccgccgccctgacggccgcccagcatctgcatggtgccgccgacgttaaccacgatctcggtggtgtagcgatcctggccgctctgatcctgccatttacgggtctgcagggagccttcgatgtagacctgagagcctttacgcaggtattcacccgccacttcggccagtttgccgaacagcacgacgcggtgccactcggtcttctctttctgttcgccggtcgccttgtcacgccagctttcggaggtcgccagggtaatgttggccactgcgccgccgttcggcatgtaacggacttctggatcctgacccagattcccgaccagaattactttgtttacgcctctgctggccatgagcacttctcccgatgattgatttctacacagtataaacgcgtcagtttaccacgctgagtacgaaaccacacccgtgttgataagtgcgaattgcattccagaattgtcttttcgatcgaccttgttgcattcgcatactggatattcattcaggtttttttgtgtcataattatgcgtttcgaccaggctgtgccggttttttgcgagatccatcacaaaatcccccgcaaaaatcgcgacaggcgcggtgtatcatcaagacgggaagtgtaaatggacaatatcgaagttcgtggtgctcgaacccataatctgaaaaacatcaacctgatcatcccgcgtgacaaactgatcgtcgtcaccggcctgtccggttccggcaagtcttctctggctttcgatacgctgtatgccgaagggcagcggcgctatgtcgaatcactctctgcctatgcgcgccagttcctgtcgctgatggaaaaaccggacgtcgatcatatcgaaggcctgtcgccggcgatctccatcgagcagaaatccacctcgcacaacccgcgctccacggtcggcaccattaccgagattcacgactacctgcgcctgctgttcgcccgcgtcggcgagccgcgctgcccggatcaccatgtgccgctggcggcgcagaccgtcagccagatggtcgacaacgtgctgagccagccggaaggcaagcgcctaatgctgctggcgccggtggtgaaagaccgcaagggcgagcacaccaaaacgctggaaaacctggccgcccagggctatatccgcgcgcgcatcgacggcgaagtgtgcgatctgtccgatccgccgaagctggagctgcagaagaaacacaccatcgaagtggtggtcgatcgcttcaaggtgcgcgacgacatggcgcagcgcctggccgaatcgttcgaaaccgcgctggagctgtccggcggcaccgcagtggtggcggatatggacgacgaaaaagcggacgagctgctgttctccgccaacttcgcctgcccgatctgcggctacagcatgcgcgagctggaaccgcgcctgttttccttcaacaacccggccggcgcctgcccgacctgcgacggcctgggcgtgcagcagttcttcgatccggatcgcgtggtgcaaaaccccgagctgtcgctggccggcggcgcgatccgcggctgggatcgccgcaacttctattacttccagatgctgcgctcgctggcggagcactatgagttcgacgtcgaagcgccattcaacaccctgagcgccaacgtgcagaaggcggtgctgagcggctccggcaaagagtctatcgagttcaaatacatcaacgatcgcggtgacaccaccgtgcgccgccatccgttcgaaggcgtgctgcacaacatggagcgccgctataaagagaccgagtccagcgcggtgcgcgaagagctggcgaagttcatcagcaaccgcccttgcgcctcgtgccacggcactcgcctgcgtgaagaagcgcgcaacgtgtttgtcgaagacaccacgctgccggagatctccgatctgagcatcggccatgcgatgaccttcttccagaacatgaagctcagcggccagcgcgccaaaatcgccgagaaagtgctgaaagagatcggcgaccgcctgaaattcctggtgaacgtcggcctgaactacctgtcactgtctcgctcggcggagacgctctccggcggcgaagcgcagcgaatccgtttggccagccagatcggcgccggcctggtgggcgtgatgtacgtgctggatgagccgtcgatcggcctgcaccagcgcgacaacgagcgcctgctggaaacgctgatccacctgcgcaacctcggcaacacggtgatcgtggtggagcatgacgaagacgccatccgcgccgccgatcacgtgatcgacatcggccccggcgccggcgtacacggcggccaggtggtggcggaaggcaccgtcgacgacatcatggcgcagccggaatcgctgaccggccagttcctcagcggtaaacgcgagatcgccatccccgcgcagcgcgtgcaggccgatccgaccaaggtgctgaagctgagcggcgcgcgcggcaacaacctgaaagacgtgacgctgacgctgccggtcggtctgtttacctgcatcaccggcgtgtccggctccggcaaatcgacgctgatcaacgatacgctgttcccgatcgcccagcgccagctcaacggcgccaccatcgccgaaccggcgccgttccgcgaagtgaccggcctggaacatttcgacaaggtgatcgacatcgatcagagcccgatcggccgcacaccgcgctccaacccggccacctataccggcatcttcaccccggtgcgcgagctgttcgccggcgtgccggaatcgcgcagccgcggttacacgccgggccgcttcagcttcaacgtcaagggcgggcgctgtgaagcctgccagggcgacggggtgatcaaggtcgagatgcacttcctgccggacatctacgtgccgtgcgaccagtgcaagggcaagcgttataaccgcgaaacgctggaagtgaagtacaagggcaagagcatccacgaagtgctggagatgaccatcgaagaagcgcgcgatttcttcgacgcggtgccggcgctggcgcgcaagctgcagaccctgatggatgtcggcctgtcctacatccgcctcggccagtcggccaccacgctctccggcggtgaagcgcagcgcgtcaagctggcgcgcgaactgtcgaagcgcggcaccggccaaacgctgtatatcctcgacgaaccgaccaccggtctgcacttcgccgatatccagcagctgttggcggtgctgcatcagctgcgcgatcagggcaacaccatcgtggtcatcgaacataacctggacgtgatcaagaccgccgactggatcgtcgatctggggccggaaggcggcagcggcggtggcgagatcctggtcgccggcacgccggaaacggtcgccgactgcgagaaatcgcacaccgcacgcttcctgaagccgctgttgaaccagtaatgtcgccggcgtgcaggccgtcgttcaggcggtccgcacgctgccccgtttccccgcaatcgaacagaaacaggcaagatttcgacattttcaggcatttccctccacgctcaccgcttctatcatcaatgttccctcggcggccgccctgtctgattcaggccgcgtctcgccggcacttcgctgccggtcaaacgttgtcccccctacattgataactggagcgaccatgaacattacccatgcctatgccgcgcatgacgcgaagtctgcgctggtgcctttcgattaccagccgcgcgccctgcgcgaccacgatgtgcagattcaggtgttgttctgcggcgtctgccactcggatctgcaccaggcgcgcaatgaatggagcaatacgatttacccggtggtgccgggccacgaaatcgtcggccgcgttagcgccgtcggcgaccatgtctcgcgttaccggatcggcgatctggtcggcgtcggttgcatggtggattcctgccgcagctgcccgagctgcgatgaggggctggaacagtattgcgagaacggttttaccggcacctataacggccaggatcgccacaccggcgccgtgacctacggcggctactccaccaatctggtggtggatcaggacttcgtgctgcgcgtgccggaaaacctcgatccggccggcgtcgcgccgctgctgtgcgccggcatcaccacctattcgccgctgcgccagtggggcgcggggccaggcaaaaaggtcggcatcgtcgggctcggcgggctggggcacatgggcgtcaaactggcgcgggcgatgggcgcgcatgtggtgctgttcaccacctcgccgtcgaaaatcgaagacgccaagcgcctcggcgcccatgaagtggtgatttcgcgcaacccggatgagatggcgcagcacgtcaacagcttcgacttcatcctcaacacggtagcggctcagcacgatctgaacccgttcctcaacttgctgcgccgcgacggcaccctgacgctggtcggcgcgccggagcacgatcatccgtcaccgcaggtgttcaacctgatcatgaagcgccgccgcatcgccggttcgctgatcggcggcatcgcggaaacgcaagagatgctggacttctgcgggcagcacggcatcacgtcggatatcgagctgatcccgatgcagcaaattaatgaggcctatgaacgcatgctgaaaagcgacgtgaagtaccgcttcgtggtggatatcgactcgctgcgcgcctgatgacggcgggcgcccggcggcgcccgtttttttatagctgcttgatgatcctggccgggttgccgcccaccacgcaattggccggcacgtctttggtcaccaccgcgccggaggccacgaccgcattatcgccgatggtcactcccggattgatcaccgcgcgcccgccgatccacacgttgtcgccaagcctgacactcttaccgaactccgccccgccgacgcgagtctcggcgtccagcggatgggtggcggtatagatatgcacgcccggcgccagcaggcagttgtcgccgatatgcacctcgcatacgtcgaggatcacgcagtcgaagttggcgtagaagttcttgccgagatagatgttatagccgtagtcgcagcggaaggtcggctcgatggtgccgccctgatagcggcccagcaactcacccagccattgtttgcgcagctcgccctcttccggcgaagagtggttatagcgatgcgttagctggcgtgcgcgccggcgttcgctgcgcagcagttcatcgccggcgtcgtacagttccccggcgatcatcttgcgcttttcttcgctcatggccatgtcggcctccttcatccgcgtgtcttgaatgcccaagcgtagctgttttagtgccgcaataaaaagggaacgttcccaaactcaggtcgcgatcacgctttaacatgaaaaaaacagaagaaaaacgggcgccgccgcccggcaatcaggcgcgcagttcctggcgcacgtgttcgggcaggccgtccaccaccagctgataggagctgtcgatcagcgtgtaaaactgcgagttcggcaggttgccgtcgagaaacaccgtattccagtgcgccttgttcagaccgtcgcaggcgacgatctccggatggtgttcacgcaggctttccgccagctccgggctggacttgaccgccagcgccggccgcccttcgacctcgcacaccatggcgaacatcacgtcacccaccttgatctggctggcctgccactggttctggtcgctctgctccgcgcccggcttcgccatgcagtactccagcaatgcgctgttattcattgggttattccccctgtaacgtggccacaatacggcgtgatccgccgtggatgcggtgctcccccagccagatgccctgccatgtgcccaacatcagccgcccgtgcctgacgggcagcgtcaaggaagcgcccagcagcgaggatttgatgtgcgccggcatgtcgtccggcccttcgtagtcatgctgatagggtgcgttttccggcacctgacgcaggaaatgctgctccatatcggctcgcaccgtgggatcgcagttctcgttgagcgtcagcgaggccgaggtgtgctgcagcaacagatgcagcaggccggtttgcaggcggtgtaagtgggttaactggttgactatctcgtcggtaaccagatgaaagccacgcgcttttgcgctgaggattagcgtttgctgatgccacatgagtgagcgcccctcaatcagtatattctctctccggtttgcggcaacttcggcggcgcgccggcaataaaaaaggagcgatatcgctatcgctcccgatgaacgtccgttcagactaacaggcgttactgcaccgcggcaaacgcctcggccacctgacgcacgttgttgtggttcaggccggccacgcacatgcggccgctgtggatcaggtagacaccgaactcttcacgcaagcgatcgacctgcgccgcgctgaagccggtgtagctgaacatgccgcgctgcgccaacaggtaatcaaagttgcgctgcggcagcgcgctcttcagggtgtccaccagcgcgtgacgcatctcgaggatgcgggtgcgcatgctctccacctcgtccagccactgggttttgagctgggcgtcgttcagcaccttggccaccagctgcgcgccgaagtttggcgggcttgagtagttgcggcgcacggtggccttcagctggcccagcacgcgcccggccgcctcttcgctttcgcacaccaccgacaggccgccgacgcgctcgccgtacagcgagaagatcttcgagaacgaattgctcaccaggcacggcaaaccggccgccgcgatggcgcgaatggcgtaggcgtcctgctccatgccgccgccgaagccctgataggcgatgtcgaggaacggaatgatttcacgttcggcgatcaccttgaccacctcatcccactgggcgggagtcaggtcggaaccggtcgggttgtggcagcacgggtgcagcagcgcaatgctgtgcttcggcagctgtttcagcgcagccagcatggcgtcgaacttcacgcccaggctttcgctgtcgaaatatggataggtattcactttgaaaccggcgccgctgaagatggcgacgtggttttcccaggtcggatcgctgacccacacctgcgaatccgggaaatagcttttcaggaagtcggcgcccactttcaacgcgccggaaccgccgacggtctgaatggtggcgatgcgcccctgctgcagcatcgggtgctgcgcgccgaacagcagctgctggatggcggaacggtaagactgcagcccttccatcggcaggtataccgaggcgccatgctcgacgctgttcaactgcgcttgcgccgcggcgaccgcccgcatctgcggaatgatgccctgcgcatcgtagtacaggccgatgctcaggttcaccttgtgcgcgcgcgggtcttgtttgaatttttccatcagcgacagaatgggatcgccggcataggcgtcaacgttctggaacacggggtttttctcctggtttattgtggttttgggcacagcgttacgttcctaatatagacggaaaagcgcattcggttttagctttatctcgccaccggcaataaaccgttttccttgatgcgattgagcaccaccgccgttttgatatgcgccacgcttttgtgcggcgacagcgtctggctgatgaattcgctcagcgccggcagatccgccaccgccactttgagcaggtaatcggcgtcgccggtggtcttgtaagcgtccaggatcgcgtccacttcctccagcatctgatgaaagctgtcgatctgctcctgcgcgtgcgtgatcaggctgacttcgatcagccccaccagccccaggccgaccgcctccggcgccagccgcgcgtggtaaccgcggatcagctgcgcctgctccaggctgatgcgccgccgcgaacattgggaggcggagagccccaccagctcgctcagctcctgattggtcagacggccgttggcctgtaacagcgtcaggattttcatatcaaaatcgtcaatgttgtacatagccacctgtaaactgtgttaataaatgttgacgttacagcctaccagtttttttaccgttgccgacgtcacaccctggcgcttaaatcgcgtacagcagcaacgcccggcgttttcgccggtaagcggcataaaaaacggctaactcatgcaggcaaacgacaattaacggcgaagtaacgcataaaaccacgaatgtataaaaaggacgccagatgaaaaagttactccctctcgcgctgctgctcgccgccggcagcgccggcgcgcaatcccacctggacaaagtgctgcagcaaaagaccctggaggtctgcaccaccggcgactacaagccctacaccttcctcaaggaagacggcggctatgaaggcatcgatatcgacatggcggaatcgctggcgaagagcctgggcgccaaggtgaagtgggtgaaaaccagctggaaaaccctgacgccggacttcgtctccggcaagtgcgacatcgccatgggcggcatctccgtcacgctggagcgacaaaaacaggtgttcttcgccgacaagctggataccgatggcaaaatcccgctggtgcgctgcaccgacgtgaagaaataccgcacgatagaacagatcaacaaaccgtcggtgcgcctgctggaaccggcgggcggcaccaatgaagccttcgtgcacgcctatttgccgaaggccaaactgacgctgacgcacgacaacatgagcattttccagcagctggtggatcgcaaggcggacgtgatgatcaccgacgcctccgaggcgttgtaccaacaaaagcgctatccgaagctgtgcgcggtgaatccgaccaaaccgatgcagtacggcgagaaggcttacatgctgccgcgcgacgatctgagctggaaactgtatgtggatcagtggctgcacctggccaaggcgaccggcgagtatcagaaaattatcgacaagtggttggcggtaaagaagtaacgcgctgagaaacggggccgacgcacgtcggcccctgcggcgcatcagtcaccgatgtattccatcgccacgcgctgcgtgagcttggtgatcagttcataagcgctgatgccggtacaggcggcgatacgctcgaccggcaacgccggcccccacagcaccgcttcatcccccaccttatcggcggcgtccggcccgagatcgaccgaaatcatgtccatcgacacccggccgacgatcggcacttcgcggccgttaatcaggatcggcgtgccggtcggcgcgctgcgcgggtaaccgtcgccgtatcccatcgccaccacgccaaggcgagtatcgcgcggacttacccaggtgccgccatagcccaccgcttcaccggcctggtgctcgcgcaccgcgatcaggctggatttcagcgtcatcgccggcagcaggccatacccggcgccgctgccgttatccagcggcgagacgccgtacagaatgatgccgggacgcacccactcgttgtgggcatccggccacagcagcgtgccgccggaggcggcgaccgagcgctggcccggtttgcctagcgcgaactgctcaaagcaggcgatctgtttcagggtggcgtcggactccggctcatcggcgcggctgaagtggctcatgatattgaccggctgcgccacgttgcggcaggcgcacaggcgctgataaaacgcctccgcctgctcggggcgcacccccagccgatgcatgccggtatcgagcttcatccacaccggcaccgggcgcgccagttcggcctgctccagcgcttcgagctgttcgatgcagtgcactgcggtttcgatgttgttcgccaccagcaccggcaggtcttcggcacagaagaagccttccagcagcaggatcggtttgacgatgccgccggagcgcagcatcagcgcctcgccgatgcgcgccacgccgtagcagtcggcgtcttgcagggtgtgtgctgtttccagcaggccatgtccataagcgtttgctttcacaacggcaatcaggcggctttgcggcgcctggcggcgcacctgttgcagattatgtcgcagagcgcggcggtcgattacagcggttgccgctttcatttcagttccttagctgattattcgtcatcgtattgtggccccgcgtagttatcgaaacgcgaccactggccgttaaaggtaaggcgcacggtgccgatcgggccgttacgctgcttaccgataataatttccgcgatccctttcagatcgctgttctcgtgatacacctcatcacgatagatgaacataatcaggtcggcatcctgctcgatggagccggattcacgcaggtcggagttgaccgggcgtttgtcggcgcgctgctccaggctgcggttcagctgcgacagcgccaccaccggcacctgcagctctttcgccagcgccttcagcgagcgcgaaatctcggcgatctccagcgtacggttgtcggacagggccggcacgcgcatcagctgcaggtagtcgatcatgatcaggctaagcccgtcgtgctcgcggaaaatgcgccgcgcgcgcgagcgcacttcggtcggcgtcaggccggaggagtcgtcgatgtacatgttgcgcttctccagcaggatgcccatggtgctggaaatgcgcgcccagtcctcatcgtcgagctggccggtacggatgcgcgtctgatccacacgcgacagcgacgccagcatacgcatcatgatctgttcgccgggcatctccaggctgaagatcagcaccggtttttcctgggtcatcgcggcgttttcgcacaggttcatggcgaaggtggttttccccatcgaaggacgggcggcgacgatgatcagatcggacttttgcatgcccgcggttttcttgttgaggtcctgatagccggtatcgaccccggtcacgccgtcgtgcggctgctgatacagctgctcgatacgcgacacggtgtcttccaggatgcgttcgatgcccttcgggccctcgtctttgctggcgcggttctcggcgatttggaagacgcgggactccgccagatcgagcagatcttcactgctgcgcccttgcggatcgtagccggcgtcggcgatctcgttagcgaccgagatcatctcgcgcaccaccgcgcgctcgcgcacgatgtcggcgtaagcgccgatgttggcggcgctcggggtgttcttcgacagctcggccaggtaggcgaagccgccgaccgagtccagctcgcccttctgctccagcgattcggacagggtgatgaggtcgataggcttgctcatctccagcagacgctgcatctcggtaaagatcaggcgatgcgggcggctgaagaagtcgttggcgaccacgcgctccgccacgttgtcccaacgctcgttatccagcatcaaaccgcccaacaccgactgctcggcctccagcgagtgcggcggcatcttcagcccttccatctgacgatctctggaacgctctctggtttcgtccgcgtttgttttgttggttggtttttttcctgccatgaaacgtagtctttatccggttgcgaatgaaggatcttgacgcgagagtatacgtgatttttgcgtcataaccgatgcaaaaaaggtattgaatcccgcacgggtgaactggatctccgatactaaaaagaatagggtgaaatcagatactcaaacgaggtaacgatatggccaagcgcattcagttttccgccaccggcgggccggaagtcttgcaatacgttgattttacaccgctcgatcccgccgccggcgaagtgcagatcgagaacaaagcgatcggcatcaactacatcgacacctatgtgcgcagcgggctgtacgcgccggccagcctgccgagcggcctcggcaccgaggcggccggcgtggtggtcaaggttggcgccggggtcagcgcgatcaaaccgggcgaccgggtggtgtatgcgcagtcgtcgctcggcgcctacagcgaagtccacaatgtgccggaagaaaaagtggcgctgctgccgcacaacctgagctttgagcagggcgccgcttctttcctgaaagggctgacggtgcactatctgctgcgccagacccacgacgtgcagccgggtgaagtgttcctgttccatgccgccgccggcggcgtcgggctgatcgcctgccaatgggccaaagcgctgggcgcgcgcctgatcggcagcgtcggctccgacgagaaggccgcgctggcgaaacaggccggcgcctgggccaccatcaactaccacaaagaggatatcgcccagcgggtggccgagctgacgcacggcgagaaggttggcgtggtgtacgattcggtggggcaaagcacctggcaggcctcgctcaacagcctgaagcggcgcggcctgatggtcagcttcggcaacgcctccggcccggtgacgggagtcgatctggcgctgctgaatcagaagggctcgctgtacgtcacccgcccttccctcaacggttacatcaccaaccgcgccgagctgcagtacgccagcaatgagctgttctcgctgatcggcagcggcgccattcgggtggaagtgagagacgagcagaaattcgcgctggccgacgcccagcgtgcgcaccaggtgctggaaagccgcagcaccagcggttccagcctgctgatcccctgatagcagccaaagaaaagggctccttgcggagccctttctgttactgcgttttgtaggggtagagcagagtccgccagagacaggggttgctttagcaacacgaattttaggtgtctctcacggtgatgaaatgggtcgcatcactgcatcgaccaacatcctaacagccccgtccggcaaaaaacacgctttatgtgccacatcgccggggaaaactgccaagctgtgatcgctgccgcattagcgtggtgggtagttatgcaagtttcatcgcgactgactgattattcagcaaaaaatcagtaacgcctgacctggggtttctgcattgaacggtaaatccataccccaactaccgccaaaatcagccacggtagcagcttgatgaccaccgcgaataacccgcccaacaacatgaacgccgccgccgccaacagcgcagcgaagatccccagcagcgagatgccggtcaccatcagcatcaccacaaagccaatgagaaagaagatttccaacatgattgctcctttgcaatgcaacgtatctgcagagtgaattacaagaagcgtgccagaatggcggaagggctaacctattgaaaaaacgaggaaggcatccggcagtgcgccgaatgcctggtgaaaaagactaactgttggtcaaattttttcggctacgccatttcgacacgcggctgacgcactaacgccagcgcctgctccaccacccgcgcatcggcgcccggcttgtgggcgttctcgctcagatggcgacgccactggcgcgcgcccggcacaccctggaacaaaccgaggatatggcgagtaatgtggccgagataggtgccgttggacagctcacgctcaatatacggatacagcgcttcgacgatcgccacgctgtccggcaccgcggtctgcacgccgaacagttcgctgtcgacccgcgccaggatgcccggattctggtaagcctcgcgccccatcatcacgccgtccagatgctgcaagtgctgttgcgcctctcccagcgttttcaccccgccgttgatggcgatggtcagcgccgggaaatcccgcttcagctgataaacgcgcgggtagtccagcggcggcacttcgcggttctctttcgggctgaggccggagagccaggctttgcgagcgtggatggtgaacatgtcgcactcgccacgcccggcgacggtctggataaagtcgcacaggaaagcgtagctgtcctgatcgtcaatgccgatgcgggtcttcaccgtcaccggaatcgatacgacgtcgcgcatcgccttgatgcagtcggcgaccagcgtcgcctgccccatcaggcaggcgccgaacataccgttttgcacccgatcggacggacagccgacgttgaggttaatctcgtcataaccgcgctgctccgccagtttggcgcagtgcgccagcgcggccggatcgctgccgcccagctgcagcgccaccggatgctcttcttcgctataggccagatagtcgcccttgccgtggatgatcgcgccggtggtcaccatttcggtgtacaacagcgtttccttggtcagcaggcggtggaagtaacggcaatgacgatcggtccagtcgagcattggcgcgatggagaagcgattggcggcgtaggttggggcgtggttgtctttcgtcatgctgagttactggctacctgagtctgtctgggttcaacgaacggcgcgcggccgcaaacggctattataacgacaatcgacgccgttgggaaaaccgccttgctggtggcgtaaataagcgggagtaaggcgaataaattcactcgttcaggtgttatctcattacgggcgcgcacggcgcctttgccttgaggacacaaccatgaacagcttcattaaacgcctgctggcatcggccattgccggctgcctgctgttttccggcgcggcgctggcgatgggcggcgacggcagcggccaaaccccgccgacctgtccgaaaggccaggtttacgacagtaaaacccagacctgcacggtggataaaggcagcaaagtcgacgacgccgaccgcactaactatgcctatgcactggcgaaaagcggccgctatcaggaagcgatcgatatgctcaacacgctgcaaaatcccaacaccgccgtcgcactgaattatcgcggctacgccacgcgcaaactgggccgcaccgatgagggtatcggctattatttaaaatcagtggccctcgatccgaaataccccaaagtgcgcgagtaccttggggaagcctatatgctgaaagggcggcccgacctggcgcgccaacagctgctggtgatccagtcgctgtgcggcaccgggtgcgaggagtaccgagatttggcggcggccatcgaccgccatccggaatcttgatccgacgcgcctgcggaggtgactatcagcggcgatgcgatacgcgatgaactcggccactatctctcccgcctgtggcgctatgcgctggtgctttcgcaccggcgggatgtcgccgacgacctggtgcaggcaacctgcgtgcgtgcgctggaacgcgccgcgcaattcacccccggttcacacctggatcgctggttgtttgccatcttgcactctatttggctcaatgaagttcgcgcccagcatcgtcgtcaggggcaaggctgcatggcggcggaagagcttggcgatgcggacaacggtgaacagccggtctggctcaatgaagtgatgcggcgcctaagccggttgccggcggcccagcgcaacgcgctgtttctggtgtatgtcgaagggctgtcctaccgggaagcggcgaaagtgctggcggtgccaatcggcaccgtcatgagccgcctggcggccgcacgcctggccttggccgatgaccgccagttgccaaacgacgattcgcaccgtaagaagccccctcctccgcccttgccccgcactcgccgataaaccgctggccgccgattcgtgttaagcggcctattccaacgcgcggataacccggcacggctgccccagcgccagcacattggccggaatgtcgccggtgacgatgctgcccgcgccgatagtcgtgccatcgccgatggtcactcccggcaggatcaccacgttgccgccgatccagacgttgctgccgatagacaccggctgcgccgaggtgcggaaaggaaaagccgggtcaccggtaaagcgttcaccggccttcagcggatgactcggcgtgtagatttgtacgttggggccgatcagcgtgttgtcgccgatggtgatggtgttgcagtcgaggaacaccgcattgacgttgataaaacagtttttaccgatgcggacatgctgcccgtagtcgcaccagaatggcgtttcgatccagctcgcctcaccccagttgccgaacagctcgccgagcaggcgatttttctcgtccgcctgatgcgagtccagcgcccccaggcttttggtcaacgccctcgcccgatggtacagggcgatcagttcttcatcgcggctgttgtattccaggccgcttaacagcttctctctttccgtcatcacacagggctcctgctcatcacgcgggtgaaaggctttataccgctctcgtcccccgctctccagcgctaaaaccggcaacgttgatctaccgcccggcggaggggaaaagttgtgatgcatctctcttttagcgcactcagcgcgcctttctctgcgctatcctcaggggaaaagggggcaactatcggcgattcgccgtaatcatggtaaaatcggcttttttacgtaccgggatatttgcgatgaactcaaccacccaggaaaagctgctggcgcaggcggaacgcctctgccagcaacgcaatgtgcgattgacgccgcaacggctggaagtgctgcgtctgatgactcagcaacccggtgcaatcagcgcttatgacctgctcgatctgctgcgcgtcgccgaaccgcaggccaagccgccgacggtctaccgcgcgctggattttctgctggagcaagggtttatccatagggtggagtccgccaacagctacgtgctgtgccaccacttcgaacagccgatgcatacgtccgcgctgtttatctgcgatcgctgcggccaggtgaccgaacgcaccaccgaaggcgtggaggagacgctgcagaagctggcgcaggaagccggatttgcgctgcggcacagcgtggtggaagcgcacggcctgtgcgccggttgcgttgaagttgaagcttgtgacagcaagcatgactgcgccgaacacgatcacagcatcgccatcaagaagaagtaagacgaagtcaggtacttccctgtacctgcggccggggcgccagaggatggagcgacgccggcctgcgctgttgccggccgccgtcagtggcggccctgcgtgttaccagcggtgtttggtgtgatcttcccaggccttcacctctttttcggccgcctctttctggtaaccgtagcgctcctgaattttgccgaccagctgttcgcgtttcccttcgatgaccgtcagatcgtcatcggtcagcttgccccatttctctttcactttgcctttcagctgcttccagttaccgtcggcttgatctttattcatagtctctccgttaacctgtggtgaatcagtgatccctgtcgccggccggggttaaccagaaatttttctggctgatgctcccttcaccttaagaagcaccgctccccttcatttaccagccacatgattcattctagttaaacatggaaataaaaaagccaaaacacaggataaaaaaccattaacaaacaagataaaaacaaaaaacgctaacaaacaacgaactaacgcgaacagaccaaggctgaaaacatgtaagcaaacatgatcaaaatcataagaaaaactaaccattaacccaacaagacgtccggtttaatgggcagtaaaccagctgccgcgcacctggtgacggtgccaaatccagcccaacgccaggccgcgcagcgccagaaacaccgccagcgccagccaaagcccgtggttgccaagcagcggcacgctgagcagcgcaataccatatcccgccgcggccaccgccatgctgttgcgcatctcggcgccgcgcgtggcgccgataaacatgccgtccagcaaatagcaccacaccccaaccagcggcagaatgacctgccagggtaaataatgggcggccaacgcacgcagttccggcaaagaggtcaaggctgccacgatctgctggccggtaacggcatacgccaggccgaaggccaacgcgaccagccctgcctgcctgcaggccgcatgccacactttgcgcagttggctgtcgtcccgggcgccgtaggcgtggcccgaatgagcctccaccgcataagcgaaaccgtcgagcgcataggcggtgaacgtcagcagattcatcaataccgcattgaccgccaccacctcgcttcccaggcgagcgccgaaaatggtcaacgacgcaaagcacagttgcagcaacaatgagcgcagcatgatgtcgcggttgagcgccagcaggcgacgcagatcgccacgccaggcctggcgcagcatctgcagggtaataccgcgcaggcgcatcacccgccacgccaaccacaggccgagcagcagcgtagcgtattcggcgatggcggttgccgccgccgccccccgcacattccagcccaggcccatcaccagccagatatccagcacgatgttcagcaggttgccgacgatcagcaggatcaccggcgcccgcacgtactgtacgccaagcagccagcccagcagcaccaggttggccagcgccgccggggcgcttaaccagcggatctcaagaaaacgccgcgcctgttccagcacgtcggcatcgccgccgacgatccgcagcgccagttcgatcagcggatagcgcagcaggacgatcgccaccccggccaacagcgccagcagcagcggttgcataaaggcgcgcgccagcgcctgggggttctgcgcccccagcgcttgcgccgccaggccggtagtgctcatgcgcaggaacagcagcagcatgaacaggaagctggtcgccaccgcaccgatcgccacgccccccagataaatggggctgtcgaggtggccgatcaccgcggtgtccaccaacccgagcagcggcacggtaatattggagaagatcatcggcagggcgaggcgccacagggctttatcggtgtcgctggtgaaagcggaaatcaggcgcatgatgggatgttcctgtgactgagtgacaaagggcgaagtcagaaacaaaaacgccccaaaacaggggcgattgatacagggagcggcggtgatggcgcggcgattaaatccagtcgccgttgcggatcacgccgaccgccagcccttcgatagtgaaattctgctgacgcagatcgaccacgatcggttggaattcgttgttctccggcagcagttcaaccacgttgccgtgctttttcaagcgcttgaccgtcacttcgtcttcgatccgcgcgaccacgacctggccgttgcgcacgtcttgcgttttgtgcaccgccagcagatcgccatccagaatgccgatgtcgcgcattgacatgccgttcacccgcagcaggaaatcggcgctcggtttaaacagggaaggatccacctgatagtgcccttcgatgtgctgctgcgccagcagcggctcgccggcggcgacgcggccgatcagcggcagcccttcttcttcttccatcagcagacggataccgcgcgaggcaccggagacgatttcgatcacgcctttgcgtgccagcgccttcaggtgctcttcggcggcgttaggcgaacggaaccccagacgcatcgcgatctcggcacgcgttggtggcatgcccgtttgcgaaatgtgctcgcgaatcagatcgtagacctcttgctgtctggtagttagtgctttcattccgccccctgtttgtttatacagtcttgctgtgagtatatacaggtaagcgcggattgggaaccgaagaataaataaaaatcagtcagtaggcgcttttcgtcagccgaaatgctgccataagaccgtgccccaaacgaacagcgccagcacgatcgccagcgacaccgccgccgatcccatgtccttggcccgcccggacagctcgtgatgttcgctgccgatgcgatccaccaccgcctcgatcgcgctgttcaggatctcgacgatcatcaccagcgctaccgatccgatcaataaaatgcgcgctatcgcacccacatccagccagacagccagtatgatagccagaagggtgaccaccagttcctggcggaaagccgcttcgtgctgccaggcggcggatagccctttataagaatagccggctgccttgatgatgcgggtcagtccggttgcttggtttgccatgttttcgtgcctttctcagaggtcggtcataataaaaagagtctagaacagtccgcgctgacggctctcggttttcgaacaccacagatctgctacccggtttctggtatgcttgcggcgcattgctaacaagaggcttcacgttgttatgtcaggttggcgtaaaatttattataaaatattgaatttaccacttaaattgttggtaagaagtaaggtcatcccttcagatccggttaccgagctagggttggatccctcacggccgattttgtatgttttaccttacaattccaaggcggatttgctgacgctgcgcacccagtgcctggcgcaggatctgcccgatccgctcaactcgctggagatcgacggcaccgtgctgccgagctacgtgttcattcacgacggcccgcgcgtattccgctattacaccccaaaagaagagtcggtaaagctgttccacgactatctggatctgcatcgcagcaacccggatctcgacattcagatgctgccggtttcggtgatgttcggccgttcgccgggccgcgaaggccacggcacgccgcacctgcgtctgttgaacggcgtgcagaaattcttcgccgtgctgtggctcggccgcgacagcttcgtgcgtttctccaacaccgtgtcgctgcgccgcatggctaccgaacacggcacggataaaaccatcgcgcagaaactggcgcgcgtggcgcgcatgcacttctcgcgtcagcgcctggccgcggtgggcccgagtctgccggcccgtcaggatctgttcaacaagctgttggcgtccaaagcgatcgaaaaagcggtcgaggacgaagcgcgcagcaagaagatctcgcacgagaaggcccagcagaacgccatcgcgctgatggaagagatcgccgccgacttctcctacgaaaccgtgcgcctgtccgaccgcgtgctgagctggacctggaaccggctgtatcagggcatcaacgtcaccaacgccgagcgcgtgcgccagctggcgcaggacggccacgagatcgtctacgtgccctgccaccgcagccacatggactatctgctgctgtcgtacgtgctgtatcaccagggcctggtgccgccgcacatcgctgcgggcatcaacctcaacttctggccggcgggcccgatcttccgtcgcctgggcgcgttcttcatccgccgcacctttaaaggcaacaagctgtattcgacggtgttccgtgaatacctcggcgagctgttcacccgcggttactcggtggaatatttcgtggaaggcggccgttcccgcaccgggcgtttgctggagccgaagaccggcaccctgtcgatgaccatccaggcgatgctgcgcggcggcacccgtccgatcacgctggtgccgatttacatcggttacgaacacgtgatggaagtgggtacctacgccaaagagctgcgcggcgccaccaaggaaaaagagagcctgccgcagatgctgcgcggcctgcgcaagctgcgcaacctgggccagggatacgtcaacttcggcgaaccgctgccattgacggcttacctcaaccagaacgtgccgcagtggcgcgaatcgatcgatccgatcgaggctcagcgtccaagctggctgacgccgacggtcaacgatctggccggccagatcatggtgcgcatcaacaatgccgccgcagccaacgccatgaacctgtgttccaccgcgctgctggcctcgcgtcagcgttcgctgacccgcgagcagctggtcgagcagctcgagtgctacctgcagctgatgcgcaacgcgccttacgcgcgtgacgtcaccgtgccgacgcaaacgccggatgagctgctggatcacgcgctgaacatgaacaagttcgaggtggagaaggacagcatcggcgacatcatcatcctgccgcgcgagcaggcggtgctgatgacctattaccgcaacaacatccaccatctgctggtgttgccgtcgctgatcgccagcatcgtgatgcatcatcgccgggtgtcgcgcgccgagctgctgcgccagatcggcatgatctacccgatgctgaaagccgagctgttcctgcataacgacaaggaacagctgccggaggtgctgcggccgatgatcgacgagctgatccgtcaacagctgatctgcgacaaaggcgacgatctggtgctcaacccggcgcgcattcgcccgctgcagctgctggccgccggggtgcgcgaaaccctgcaacgctacgccatcaccatgtcgatcctcagcgccaacccgagcatcaaccgcggcgcgctggagaaagagagccgcatcatggcgcaacgtctgtcggtgctgcacggcatcaatgcgccggagttcttcgacaaggcggtgttctccaccctggtggcgacgctgcgtgaagaaggctacatcaacgacagcggcgatgcgatccgcgagcacaccctcgaggtgtacagcatgctgagcgatctgatcacgccggaaatcaagctgaccatcgaaagcgtcaacatgccggaagagaccaacgctctgccgaaaaccgatgcggaagaagagaaagacgagtgatttcgcccggcgcggaaacacaaaaggcaccccttggggtgccttttttcttgcggcagggaaccgttacgccggcagatagctcagcgcgatgccgataaacaccaccagcccgacatagttgttctgcagaaaggccttgaagcaggcgtcgcgctcgcgcccggcgatctgcttctgctggtgaatgaacagtgcgcccgccagcagcagcgaccagtaaaacgcgccgccgagctgcgccagataaccgacccacaccagcagcaacaacgtcgcgaactgcaacagcccgacgatcagcttgtcataacgcccgaacaggatagcggtggacttgatgccgattttcagatcatcatcgcgatcgaccatcgcatacagcgtgtcataggccaccgtccagcagatgttcgccagcagcagcagccagcagctgagcggcagcgattcgctgaccgccgcataacccatcggaatgccccagccgaacgcggcgcccagcacgaactgcggcaggttggtcacccgcttcataaacggatacacccaggccagcgccagcgccgccagagacagccagatggtcatcgcattcagcgtcaacaccaggcagaacgagatcagcaccagcaccacgaacagcaccttggcctctttcgcgctcacccggccgctcggcatcggccgcccggcggtgcgtttcacgtagccgtccaccgcgcgatcggcatagtcattcaccacgcagccggcggcgcgcatcaggaacacgccgagcacgaacaccaccagaatcgacagcggcggcacgccttttccggccagccacagtgcccacagcgtcggccacaacagcaacagcgtgccaatcggtttatcaatgcgcatcaaatggctgtaagcccgccatttactttgagtcacgcttccctccaacgtcttgctctcctctcttatgcggggaccgctgaatacagcggcgaagccggtaaaaacagttcggtcagcagcagcggcttgcccgccagccgcaaccgtgaacgacgcgcccacagcgcatcctgtcggccgatatggatatagtcgcgggtcagatcgccgctgctgaacaaatagcgccccagcggcagcgtccccagatccaccagcgcctggtcggggccggtcagcgtatgttccgggatcaccgtgcgccccagcagccagggctggccgtcgcccagcagcaccacttcgcgcagccagtagcgcgggctatcgggcaggtggttcgcctcgtcgcccagcgcctcgcgcgtgacgaagcattcgcgctgcggttcaacgcgcacctgggcgcaatggcgttcaaatcgtcgggtcatggagcctaactccatcagccagtcgctgacggcggcgggcgccggaggatcctgttcggataaccactccagcggcggcaggatggaatccctgatgccagacattgctttactcctcgcctgaaccgcagccggtacggcgcgccagacgatacaaactgttaacaggcccccattgtagcgcagaaatgcgaaagcggcaggctgattcgtggcgaaaacggcaggtctgtcggccggaaaaaccggggttctgtcatctttttgccatccgcattctctatcttcatttcccggcgcgctgacgattctgtgatcgcccgcaaagtttcagcttcctcgcgttgtgttatctacgcgcgtagataccctgatacggcagcgttgaatcgccatgcgtccgacatgatttgtcggcacacctttgttgccggcaccagggaaaccatctttaaccgcgcccctccaggcgcagaataaaagaggatagcactgccatgagcgaaacaacgcttgccccttcacagaccgccgacgccgcgctggcggccgatgaacgcctggcaaccaaagaggggcgcagccaattttggcgcgccaccttctcctgctggctcggcaccgccatggaatacgtcgacttcgcgctgtacggcctggcggccggcatggtgttcggcgacgtgttcttccccgaagccacgccgctggtggcgttgctggccagcttcgccacctactccgtcggcttcgtcgcgcggccgatcggcgcgctggtgttcggctggatcggcgatcgcaaaggccgccgcgtggtgctgatcaccaccgtggcgctgatgggcctctccaccacattgatcggcctgatcccgccctatgcgcaaatcggcgtctgggcgcccgcctgcctggtgatcctgcgcttcgcgcaggggttcggcgccggtgcggagctgtccggcggggcggtgatgctggcggaatacgcgccggccaagcggcgcgggctggtggcgtctatcatcgccataggctccaacagtggcaccctgctggcgtcgctggtgtggctgctggtattgcagctcgacaaggaagacctgatgagctggggctggcgcattccgttcctcgccagcatcctgatagccggggtggcgctgtatctgcgccgccacgtgcgggaaacgccggtgttcgaacgcgagctgcagcaaaaccaccagcgcatgctggacgccgcccaggccgcgccggatacgcgcagctacctgcagcgcaccaaggcgttctgggtgatgctcggcctgcgcatcggcgaaaacggcccctcctacctgtgccagggctttatcgtcggctacgtcgccaaggtgctgatggtcgataaatcggtgccggcgctggcggtgctgatcgcctcactgtgcggttttctggtgatcccgctggccggctggctctccgatcgtttcggccgccgcatcacctaccggtggttctgcctgctgctggtgctgtacgctttcccggcgttctggttgctcgacagccgtgagccggcgatcgtcatctcggtgatcgtggtcggcatgtgcatcgcatcgctggggatcttcggcgtgcaggcggcctacggcgtcgaactgttcggcgtgaagaaccgctactccaaaatggcgttcgccaaggagctcgggtcgatcctctccggcggcaccgcgccgctgatcgccaccgcgctgctgtccggtttcggtcactggtggcctgtcgcctgctattttgttgtaatggcggccatcggcttaatcaccaccttctttgctcccgaaacccgcggccgcgatctcaacctgccgcaggatgccgcgtagcgggaaggcgaacaggacctcaatttggataatcactccgcgcgccgcgttacccgcgccgacgtggctcgcatagcgggcacctccgtcgccgtggtcagctatgtgatcaacaacggtccgcgcccggtggcggaagccacccggctgcgcgtgctggcggcgatcgagcagaccggctaccggccgaacgacatcgcgcgagcgctggcctccggcagcacgcaaacctacgggctggtggtgccggatatttccaacccgttcttcgccacgctggcgcgggcgctgcagcaggaggccttcagccgcggccgcgtgctgctgctgggcgacgccggcgacgaccggcagcgcgaatatgagctgatcaacaacctgctgcgccgccaggtcgacggcctgctgtacaccagcgtcgatcgccatccgtggttcgatctgatccgcgcctccggcacgccctgcgtgatgatagataccatcgacagccaggccggcgtctgcgccattcgcgtcgacgagcgcgacgccgcctgccaggcgacccgccatctgctgcagcacggctatcgcgatatcggcatttttatcggcccgctgaccatgctcaacgcacaggatcgcctgaacggctggcgcgatgcgctgctggaagcgggcatcgcgccgcgcgacgaatggattttcgaggtgccctacacccgccagggcggttaccaggccacccagcgcctggtgcaaggcccgcgcccgcgcgccgttttcacctctaacgagcagcaggcgctcggctgcctgtcggcgctggcggaacatgggctgcgcgcgccgggcgatctggcgctgatctgttttaacggcacgcagcaatccgaattcagcgtgccgccgctcagcgcggtcgagcagccgatcgacgccatggccaagcgggccatcgccatgctggccgccggcgccgcgcccgccgagctgcatgaattcgcttttcaactgcgcatccgccactcgtgcggctgctagcggtttttcaggacaccttactatgcgtttaatcattgattgcgatcccggcaacggcgttcccggcgccaacgtcgatgacggtctggcgctggctctggcgctggcggccaaaccgcagttgcaactggagctgatcagcatcgtggccggcaataccccgcgtgaagtgggcttcgccgtcgcctccgatctgctggcgcagagcggctaccgggtaccggtcgccctcggcgcggcgcgcgccctgagcgagccgccggagccgtggcgcgcccatctggaccgcccgatcgccgatccgcagctggcggcgctgtggcgcgacttgcccgccccctcgctggccaacgcgcccgcaccggacgccgccatcgccatcggcgaactgatctgccggcatcccggcgagatcacgctggcggcgatcggcccgctgaccaacgttgcgcacgccatgcagctttacccgcagatggcgcaggcggtgaaagagatcgtgatcatgggcggcgtgttcaacgtcgaaggatacatcaaggacaccaattttggtttggatccggaagcggcgcggctggtgttgaacagcggtgccaatatcacgctggcgccgctggacgtcaccacccagaccatgctgacccaggcggatctggccgcgctgacccagccggataccccgctatgccgttatttgcgcaccaccacgcagccgtggatcgactattcgcgccatacgcggcgcctgccgggctgctggatccatgatgcgctggtgatcgcctggctgctggaaccgcagttggtcacgaccgaaatgttccatgtggatgtggcgctggaaggggcgttgacgcgcggcagctcacgccgttggcggccgggcggcctgcgcctgacggtcggtatgccgccgccgcagggcaagccggtgcgcatcatgcagcaggtggacaacgcccgtctgctggcgttgatcggcgcaacgctggcgcgcggatgaaaaaaggtgcgccaaggcgcaccaatcatcgagccagcatcggcagcgccgggtgttaccccttgcctttaacgctgctgataaacgttttacgcgcagtggtagagcccaacttctcggcctcattcatcagcttcagcgccttatcgatatcgcccgccttcaccgcctgcttgatgccgttattaaagtagctttcggtatcgttgagcatcggctccgccggtttctccggcgtcggcatcggtgccgccgccgcggccggggtgctcgaccccaccaccaccggcgccacgctcggcgcaggctgcagcatgccgatcatcacgttgccggtgccctgttcagcggtgaccttaagcttcagcgtgccggtcgtcgcgtggccggcgatcggatccgggatatccggcaccgcgttgcccaccccctgcgcataggccttggccgggttggtcagctgcgtagttttcaccaaatcctggcgagtggtgtacaccagcaggtaaatctgtttttgaccgagcgccggcgtcagcttcagcgtgccttcgagacgatcggaggacatcgcccccggcggctggtaagggaaatagctgctcgggtaatacgccgccgggcgcagatgctcgtccagcaccagcacgctcggcgcgtacagcgaattgtttttggcgaggctgctcagcgtcacttccagcgaaccgcgatcggccggcaacgtataggcggcgatcgccccctggatctcgccctgattgagctgcgggctgacggcgtcgagcttcacctcttgcgacaccggcggctgcaacggctgccacggcaggctttgcagcgtggcggcgctgatggccggcgcgacggaaacgttggccggcgtatcggcattggccgccaaaggcgcgccgacggtcagcgccagcgacaggcagagtgacagcagattctttttcatcgttatatcctctttcagcgccgcgatggttcaggcaagagatccggccgcggcgaatgcgattgggggagagcctgcggccctccccgtcctgtcgttaccaccaaatttccatctgggcgccgaaggtgacttcgtcatccttgccgcggctgaaggtatgcatgctggtgtcgttgtaagcggtgccggcgttatacccggtatcatcgccggtggcgtagccccacttctcatcccacttggcgtaggtggcgaacaggcggatggccggacgcgaccagatgctgttgcccgcctgccattgctgcgccagggtcactttatactggccgttgcgatcgccggtgcgctgggatttgacgttgtcatagccggcttccagcaaggtgctcatgatcggcgtccatttgtacatcgggcgcacgcccacggtgtaccaggtggtgccgttgttgttgtcgcggtcgatgtcctggaacatggcgacgtacatcagcgcccattgatcgttgaagtcgatggcgccgtgatccagcacgcggatcatcttgccgttgttatcgatggtggcgccttcgttgcggccgttgttctgcgaggtcatcgagtcggtggcgtactgcagcacgaacttgttgtaaccgttcaggatgctctgcgtgtgttccgcggtgaacatccagccgtctttgctggcgccgtccgccaggcggtagttatcctgcgcattggcgcggccgtagtccacgcccagctccagggtgccgcccgggttcagctccaggccggccagacgcaggtcgaaggtatcgttgacggtcggacgctgtttccattcgttatccagatagccgtaagagccgccggattcggagttgcgggtcacggcggcggacagcttgccgaagcccagatcgatgttctccagaccggcgcccgggccggagatatcccagtagtagaagtcgatcatgtgaacgtcatgacgctgatagaaacgcttaccggcccacagcgtggagcccggcagccagtcgatcaggtttttaccctgcacgttgacttcgcggaagcccggcgtcacgtcttcccagtcggaacgttgcgagaccgaataggccaggttggtgtcgaaatagaagctcttgtcgccttctttccacacttcctgccccagtttcagttcggcgtaggtttcacattcgttgccgagacggtatttgctcgcggcgccggtggccttgaagcactgttgctcaccgccgctgccggtccagccgatgccggaacgggcgtaaccgtgaaaatccacggccagcgcctgagtagagagaacaccggcggcgacagccagtgccagaggaagtttgcgcagagtagtcatcattattctcctgttataccgactttgatgctttaaacgcccggctcctggtgcagccgtttacatgccgtaccgtcttcacggaacaggtggcaacgatgaggcggcaggccgatggcgaatgtggcaccttcttctaccagcaccacgtcgttctggcggtacaccaggttttgacggatggccgggatttggatgtggatttgcgtctcgttgccgagctgctccaccacctgtacgtcgccggtaagccgcacttcagaggcttcgccgggcagcaaatgttcggggcgaatgcccagtgacagattggcgccgggctgaacgcccgcgccttccaccggcagccagaccagttgacggttgggcagttcgacctgcacctgttgcggctgcgcagcggtcaccttgaccggcaggaagttcatcttcggcgagccgataaacccggcgacgaagcggttggccgggtagtggtacagttccagcggcttgccgacctgcgccacgcgaccggcgtcgagcaccacgatcttgtcggccagcgtcatcgcttcgacctgatcgtgagtgacgtaaatcatggtgcgctgcaggcgcttgtgcagacgggagatctcgatgcgcatctgcacccgcagcgcggcatcgaggttggacagcggttcgtcgagcagaaacacgtccggctcggccaccagcgtgcggccgatcgccacgcgctgacgctgaccgccggacagcgccttcggccgccgatcgagcaggtgcgccagctgcagcacctcggagacctggttcacccgttgattgatttccgctttcctggcgccggccagcttcaggccgaacgacatgttgtccgccaccgacaggtgcggatacagcgcgtaggactggaacaccatgccgatgccgcgctcggaaggcggcacctcattcatccgtttctcgccgatcagcaggtcaccggaggtgatgtcctccagcccggcgatcatgcgcagcagcgtcgatttgccgcagcccgacggcccgacaaacaccacaaactcgccgtcttcgatggtcagattgacgtctttggaaatcacggcctcaccgaaggccttataaacgctgcgcagtgtcacgctagccatgcgttactcccctgctttcgcagttaacatgtcgtgtgaaaatggcggaggcaaagcccgccaaaacccattgatgaccctcttgctgcgcgccgtgctgccatgccaacggcaaggtcgcctcagacggcgcggccgcctgagtataaggctgcaggtttatcagcgcttcaaggcattgatcctgatgggtaataagtaagcgcaccacgccgtcccgctggctgaccgcgttcagctcgccgcgctggatgagcggcgaacggcgcagggccaacagcgcctggcagtaacgtaaggtggagtggctgtcgtgctgttggcggctgatggccaatgcgcggtgttcgatcgccacctgctgataccagctgatctccccggcggtgacctgttcgggggcttcatgccacggcatcggcgtttgcgcgccgcgcggatcctgcaggccggcggcatgcggcagccccagctcttcgccctgatacaggcagatcggcgccggcaacatcgccaacagcgtcaaaaaggcggcggcggaacgcagatcgccttgcccccagcggctgaccactcttggctgctcggcgtccccggtgctccacaggctgtccgctaacgtggcgcggcgggcgtgcaacaccgccgccagcttctccgcgctgaacggcatcacgtccagcgccagcgcgccgtgggcgaaccgctgcggcgcgacggcattgcgaacgcggttggcttcatcgccgtaccacagcgtcagcccttcgcccgtcaccgtcgcctcggcctccggcgccagcgtctgcggcagcagcaggccgtcgatcgacagcgctttcaggtacggcagcgccgcaagcatgccgtgtgcgtcgcccacgccgtccccgtttccgtcacggaaactggccggatggatccggtacagggtgggctgagtggcgataggcattgacgacataaatccggtatccctgctgcgcgtggcgttaaaaatcgatgtgccgatagtgcgggagtcaccggaaagggtaatcatccgtaacaggatttttcatgggggaggaggcgggaggatgagagaacgaccgcggcgatgagaagttccgcgcttaaggcaaatctgtgatccggctggcaaaaatcgcccccctattgtgtgcctgacgccacagaatagagcacaacgttaactggatcacactcctcatctcaggggcgtagagggggggaggatgagaatatgtcgcgttgtgacccactattaccgcgaaacgtctctccttgatttatgtgcccacaaaaagaaggactggattatgactcgcagcattaccctcgcccgcacgctggcgctctcggcactggccaccctggtgctctcttcttccgccttcgccaagattgaggaaggcaaactggttatctggatcaacggcgacaagggctataacggcctggcggaagtcggcaagaaattcgaaaaagacaccggcatcaaggtcaccgtcgagcacccggacaaactggaagaaaaatatccgcaggtggccgccaccggcgacggtcctgacatcattttctgggcccacgaccgcttcggcggctatgcgcagtccggcctgttggccgaaatccacccgtccaaagccttccaggacaagctgttcccgttcacctgggacgccgtgcgctatgacggcaagctgatcggctacccgatcgccgtcgaagcgctgtcgctgatttacaacaaggacttggtcaaacagccgccgaagacctgggaagagatcccggcgctggacaaacagctgcgcgccgccggcaagagcgccatcatgtggaacctgcaggaaccctacttcacctggcctatcatcgccgccgacggcggttatgccttcaagtatgagaacggcaaatacaacatcaaggatgtcggcgtcgccaacgccggttcgcaggccggcctgcagttcatcgtcgatctggtgaaaaacaaacacatcaacgccgataccgattactcgatcgccgaggccgcgttcaacaaaggccaggccgcgatgaccatcaacggcccgtgggcctggaacaacatcgagcagagcaaaatcaactacggcgtgacgctgctgccgaccttcaaaggcaaaccgtccaaaccgttcgtcggcgtgctgaccgccggtatcaacgccgccagcccgaataaagaactggcgaccgagttcctcgagaactatctgctgaccaacgaagggctggcggacgtcaacaaagataaaccgctgggcgcggtggcgctgaagtcctaccaggaaacgctggccaaagatccgaagatcgccgccaccatgcagaactcgcaaaacggggagattatgccgaacatcccgcagatgagcgccttctggtacgccgaacgcagtgcagtgatcaacgccgtcagcggccgtcagacggtgaaagccgcgctggacgacgtgcagacccgcatcaccaagtaacgacgtcgtgcggggtgccgtggcgccccgccattgcttcacagaaaggaacgccctatgcaattcgctcacgccgggacgcctgcgcgtaaaaaatcgaagtggtggcaaagcgacgcgctgaaatggctgttggtcggcctgttcagcctggtgacctgctacctgattgtgttgatgtatgcacagggtgaatacctgttcgccatcctgacgctgatcctggtcagcgccggactttacgtcttcgccaaccgccgcgcctacgcttggcgctatgtgtatcccggcgtcgccggcatgggactgttcgtcctgttcccgctgatctgcaccatcgccatcgcctttaccaactacagcagcaccaaccagctgacctttgagcgcgcgcaatcggtgctgatgcaacgccagttccagagcggcaaaaccttcaccttcggcctctacccggcggaaaatcagcaatggcgcctgcaattaacctcgccggacagtgaacagccgttgatttccgagcctttccgcctcgacgccgctgcgccgcaaaccctgacattgaccacgcagagcgccgcgccgcagggcgaacgcgccacgctgcgagtgatcacccaaaaccggcaagcgctgagccagctggtggcgcaactgcccgacggcggtgaattgcgcatgagctctcttcgccaattctccggcacccgcccgctgtatgcgttggaccaagacggcagcacgctgaccaataaccagacccaggtgcgctatcggccgaacggcgacatcggcttctatcaggcgatcaacgccgacggcggctgggcgcaggaaaccctgagccccggctataccgtcaccaccggctggaaaaacttcctgcgggtgctgcaggacgaaggcatcaagaaaccgttcgtgtcgatcttcatctggaccatcgtgttctcggtaatgacggtgatcctcaccgtggcggtcggcatggtgttggcctgcgtggtgcagtgggaggcgctgaaaggcaaggcgatctaccgcgtgctgctgatcctgccctatgcggtgccgtcgttcatctcgatcctgatcttcaaagggttgttcaaccagagcttcggcgaaatcaacatgatgctcagccatctgttcggcatcaaacccgcctggttcagcgatccgctcaccgccaagagcatgatcctgatcgtcaatacctggctcggctacccgtacatgatgatcctgtgcatggggctgctgaaagcgatcccggacgatctgtacgaggcctcggcgatggatggcgccaacccgtggcaaaacttcttccgcatcaccttgccgctgctgatcaagccgctgacgccgctgatgatcgccagcttcgccttcaactttaacaacttcgtgctgatccagctgctgaccaacggcggcccggacatgatcggcaccaccacgccggccggctataccgatctgctggtcagctacacctaccgcatcgccttcgaaggcggcggcgggcaagacttcggcctggcggccgccatcgccacgctgatcttcctgctggtgggcgcgctggcgatcctgaatttgaaagccagcaagatgaacttcgattagggagaataacgatggccatggttcaacccaaatcccagcgcttgcgcctgtggatcacccatatcttgatgctgtgctttatcgccctgatcatgtttccgctgctgatggtggtggccatctcgctgcgcgccggcaacttcgccaccggcagcctgataccggaaaccctctcttgggatcactggcggctggcgctcggcttcagcgtcacccacgccgacggcagcgtgacgccgccgccgttcccggtgctgctgtggctgtggaactcagtcaagatcgcggcgatcaccgccatcggcatcgtgacgctgtccaccacctgcgcctacgccttcgcccgcatgcgttttcgcggcaagagcacgctgttgaaaagcatgctgatattccagatgttcccggcggtgctgtcgctggtggcgctgtacgccctgttcgaccgcctgggccagtacattccgtttatcggcctgaacacccacggcggcgtgattttcgcctacatgggcggcattgcgctgcacgtctggactatcaaaggctatttcgaaaccatcgacaattcgctggaagaagcggcggcgctggatggcgccacgccgtggcaggcgttccgtctggtgctgttgccgctgtcggtgccaattctggcggtggtgttcattctgtcgtttattgccgccatcaccgaggtgccggtggcgtcgctgctgctgcgcgatgtgaacagctacacgctggcggtggggatgcagcaatatctcaacccgcagaactacctgtggggcgacttcgccgctgctgcggtgctgtcggcgataccgattaccgccgtgttcctgctggcgcagcgctggctggtgggcggcctgacggccggcggcgtgaaggggtaatttgtgccactgcagtgcgtttgatgtttttccgcgatagcggtaatcctgtgtctttggcggcctttggccgccatttttatctccgctattcccgtttcagccggtcggtgttggccagatagagcgtcaccaccagcaccaatatcgccgccgcgtagatcagggtgtcgatgggatttttgtgatccacgataatcaaacgaataatcgcggtaatgccgatataaataaaataacgcagcgggaaatgataacccgactcaaaatacttgacgatcaaggcgataaattcaaagtacagaaaataaatcacgatgccttcaatcaacaggtaagaggacgactcttcgctattaataaataacaccttcgccagatggatggtctccttgaccagaaacaccaccagaattgccgccagcagcaacaagcccacgttcagcacccgctgcagccccttcgctatcatgatcgaacgcgacgtttttgccataaaacctctcctgaataccgcttatatgattcaaccgtgccaatataggcattgtcctaaaaattccgcccttcgcgaaagcactttaaaccccatttaattcatcacgttataataagatgtttctggcttatagatttgtagcaaatcgaaatgtcaactatcatgggtcacagagatctttacataaaaccaataacctcgaattaacaagggaattctttatgcgcgctaaacttaacggactggtcgctgcaggcctgtttacctgtgcattgtccggccacgccgccggcctggtagcccctgacaacgatctgcgtaacgatctcgcctggttgtctgaccgcggcgtcatcaacgtcagcctgtccacttggccgctgagtcaggaagagatcagttccgttatcgcgcaggccaagccggtgaccaacaccgagaaaaacgtcatcgaccgcgtgcaacgccgcgtcgatgccctgaaagccaacatccgcgtcagcggttacgcgtcgaccgataaacctggcaccccgcaaggcttcggccaaaacgagtacgccgacgatcgcctgaccatcggcgccggcgccaacggcgagttctgggacgtgcgtctgcagggctcggtggaaggcgatcaacgtgtcagcgacggttccaaattcaacatgaacggctcctacggcgcagtgaaaatctggaaccaatggctctccttcggcgaggtttcccagtggtggggcccgggttacgacggcagcctgatccgctccgacgccgcgcgcccggtcgcgggctttatgctgcagcgcgccgaccaatcgccgtttgaaaccccgtggctgtcgtggatcggccgctggcaatatcaattgtccgccggccagctgtcgcagtacagttctgtaccgcacaccaaactgatcggtggccgtttcaccatgatgccgaccgacttcctggaactgggcgcttcacgcatcatgatgtggggtggcgagggccgaccgcagtcgtggagctcgttctgggacggcttcaccggtaaagataacgatgattcaggtaaaggcaacgatccgggcaaccagctcgccggtttcgatttcaaactgaaaatgcagccgctgatcggcctgccggttagcctgtatggtcaattggtgggtgaagatgaggcaggttatctgccatcgcaaaacacctatctgctcggtttggaaggccacccggaatggggcccgaccaccgttaactggtatatcgaagggtcagacacccgttcggatatgagccgcaaaaactatgtgtacacacactatacctacaaaggcggctactaccagcagggttacccgctgggccacgccatgggcggcgacggccagatgctgtccggccgcgtagagctggtgctggacgacagccagcgctggagcacccgcgtggtttacgccaaggtgaacccgctgagccaaagcatcaaccaggcgttcccgaaatccgatacgctgaagggcgtccaggtcggttggggttacaccttcccgtcccaggttaagttcgataccagcctgtggtacaccgacaacgatcacagcaccgccgacgacgtgggcgccggcgtcagcttcgaagtgccgatcaatctgtaatttgttacagacgtaaaaaaacccgccgcggcgggttttttattggcttcagctcaggcgcttagcgccattccttgaagcggttgatcagcgcattggtcgagctgtcatggctgctgattttctcgctgcccgccagctccggcaggatgcggttagccagctgtttgcccagctccacgccccactgatcgaaggtgaagatgttcaggatcgcgccctgggtgaagatcttgtgctcgtacagcgcgatcaggctacccaggctgaacggggtgatttcacgcagcaggatcgagttggtcggcctgttgccttcaaacaccttgaacggcgccacgtgcttgacctgctcaggggttttgccctgctccgcgaactcggcttccaccacttccagcgacttgccaaacgccagcgcttcggtctgagcgaagaagttggacaacagtttggcgtgatgatcgcccagcgggttatggctgatggccggcgcgatgaaatcgcacggcaccagcttggtgccctggtggatcaactgatagaaagcatgctggccgttggtgcccggctcaccccaaatgatggggccagtctggtaatccaccgggttgccgttgcgatcgacgtacttgccgttggattccatgttgccctgctggaagtaagcggcaaaacggtgcatgtactgatcgtacggcagaatggcttcggtttcggcgccgaagaagttgttgtaccaaataccgatcagcgccagcagcaccggcaggtttttctccgccggcgtctcggcgaagtgcttgtccatagcgtgcgcgccgctcagcagctgctcaaagttgtcataaccgatggacagcgcgatcgacaggccgatcgccgaccacagggagtaacggccaccgacccagtcccagaattcgaacatgttgtcggtatcgatgccgaactcggctaccgctttgccgttggtggacagcgcggcgaagtgcttggccacgtgctgttgatcggcggcgctgctcaggaaccagtcacgcgcgctgtgggcgttggtcatggtttcctgagtggtgaaggttttggaggccaccaggaacagcgtggtttccggattcagcggctgcagcgtttcggcgatgtgggtgccgtcgacgttggagacgaagtgcatgttcaggtggtttttataagggcgcagcgcttcggtcaccatgtaagggccgagatccgaaccgccgatgccgatgttcaccacgtcggtgatcggcttgccggtgtagcctttccactcgccgccgatgacgcgcgcgcagaactgtttgatcttggccaataccgcgttcacttccggcatcacgtctttgccgtcgaccaggatcgggctgttgctgcggttgcgcagggcaatgtgcagcaccgcgcgatcttcggtgcggttgatcttctcaccggcgaacatcgatttgatggcgccttgcagatcggtttctttcgccaacgcctgcagcttctccagggtttcctgcgtgatgcggttcttggaatagtccaccaacatttgatcgttgaaggtcgcggagaacctggagaaacgatcgctgtcctcggcgaacaggtcggcgatccgtacgtctttcatctgtgcataatgttgctgcagggcttgccaagcagcggtttgactaggattgatatttttcatagcaacactcttaggcttgagaataaaaatgacgcgtttgtccgattgtagcctgttcgactgtgattatgatcgcttttcttgcgataggcgctaactgtcaacgcattgccgcctcgtttcagctttcactctatacttttggctaacggcctgttatcggggttgccgaattgtcatcaggctgtgtcatcgtcgtttatttcgtcatttgaaagggatctcgcttatggaattatccgccccgctcatgttggtgcttatcggcctggcgtcgctgctggcgcagtggctggcctggttgctgcgcctgccggccatcttgccgctgctgctgttcggcatcgtgctcggcccgacggtgcatctggtacagccggatctgctgttcggcgatctgctgtttccgctggtgtcgctgtcggtagcgatcatcctgttcgagggggcgctgacgctgcgcttcgaggagatacgcggcctcggcggcgtggtgcgcaacctggtcaccgtcggcatgctggtcacctttctggtcatcagcctcgccagttggtggctgctggatttcccgccggagctggcggcgttgatcggcgcggtgacggtggtgaccgggccgacggtaatcgccccgctgatgcgcgtggtgcggccgaacgccaacattaaccaggtgctgcgctgggaagggatcgtcatcgatccggtcggcgccatcttcaccctgctggtgttcgagttcatcgtgctgaagcagaatgcggaatcctatacccacctcttttggacgctgggcgtgaccgccgccgtcggcctgatcgccggcgcgctgttcggttacctgctcggcctggcgctgcgccgcgtctggctgccgcgctacctgcagaacctggcggtgctggctattatgctgaccgccttcggcgtttccaacgccatcgccgacgaatccggtttgctgaccgtcacggtgatgggcatctggctggccaacatgcgcgacgtggacaccagcgatattctggcgttcaaagaggagctgtcggcgatcctgatctcggcgctgttcatcattctggcggcgcggctcgacatccaggcgctgtggaacatgggctggccgctgctgctgctgctgctggcggtgcagttcatcgcccggccgctgtgtatcgcggtgtcgacctggcgctcttccctgcactggcgcgatcggctgctgctgtgctggatcgccccgcgcggcatcgtggccgcggcggtcagctcgctgttcgcgctgacgctgcagcgcagcggctatcagggcgccgaccggctggtgaccgtggtgttcgccatcatcatcggcaccgtggtgttgcaaagcctgaccagcggcataatggcgcgctggctgcgggtgcagcagcagaaaccgcgcggcgtgctgatcgtcggcgccaacagcgtggcgcgcatgctggcgcaggcgctgatcaagctgaacgtgccggtgatcgtcaccgacagcagctgggaatactaccgtcaggcgcgcatggacggcattccggcctactatggccacgcctactccgaacacgccgagaactacctcgatctgagcaatatcgcccaggtgctggcgctgtcgcccaatcgccaccagaacgcgctggcggtctaccacttcggccatctcttcggcgaagatcacgtgttcgccatccgttcgggggcgccgttgaaagggcgcggcgccagcgcggaaagttcgcgtttccgccggcatgaaattttatttaatcaggaagccacctacggccgcctgagcagcctgctcgccaggggggccaccatcaaagcgaccaaattgaacgaaaatttcggttggctggagtatttggagaaacatcagggcgttattccgctattcagccaaaaggaagacggttctctgcaaccgattggcgccggttccacgcccgcgatgccctgtacgcttatcgcgctggtgcaagatgaaaatccctcaccgtctgtacgttgacagaatggcgataaccggctattcctaacagcctacttgcgcacccggtgcgcaagccagaagaggcgcgtcgcccaggtagagtgtcagaggagccgtttctccgttgacggcacccgagggggagcgacgccgaggtagggtaatggccggccattatcgtatcgactacaggggctgaatcccctgggttgtcaccaggggatcgcccgcagggcgatcgacaaggtggggcgcttctgggtgtatcgtagcctgacctctacgcctgccccctgtttaccgctctccccttgtgccaaggctatggaattacagtgccccaaacgggcatccctgacacgaggtttctagatgaaccaagcagcaccccagaattccaccgtggtagccaagttcggcggcaccagcgtcgccgactttgaagccatgaaccgcagtgccgacgtcgtgctggccaacccgcaggtccgcctggtggtgttgtccgcttcggcgggcgtcaccaacctgttggtcgccctggccgagggttgcgaggccgacaagcgcaattaccagcttgatgaaatccggcgtatccaatacgccatcctcgatcgcctcgcggcgccggcggtgatccgcgacgaaatagaccgcctgctggaaaacatcgccatgctgtcggaagccgcgtcgctggccacctcgacggcgttgaccgacgaactggtcagccatggggagctgatgtccaccctgctgttcgttgaaatcctgcgcgcccgcaacgtgcaggccgaatggttcgacgtgcgcaaagtgatgcgcaccgacgatcacttcggccgcgccgtgccggacagcgccgcgctcagcgaactggcccgggcgcagttgcagccgcgcctgcaggaagcgctggtggtcacccagggctttatcggcagcgagccgaagggccgcaccaccacgctcggccgcggcggcagcgactataccgccgcgctgctcggcgaagcgctcggcgtcggccgggtggatatctggaccgacgtgccgggcatctacaccaccgatccgcgcgtggtgccggcggccaagcgcatcgacaaaatcggtttcgaagaggcggcggaaatggccaccttcggcgctaaagtgctgcatccggccaccctgttgccggcggtgcgcagcgatattccggtgttcgtcggctccagcaaggatccggcggccggcggcacgctggtgtgcaacaccaccgagaacccgccgctgttccgcgcgctggcgctgcgccgcaagcaaacgctgctgacgctgcacagcctgaacatgctgcacgcgcgcggtttcctggccgaggtgttcaacatcctggcgcgccataatgtctccgtcgatctgatcaccacttcggaagtcagcatcgcgctgaccatggacaccaccggcgccacctccgtcggcggtagcctgctgaccacctcactgctgaccgaactgtcgtcgctgtgccgggtggaagtggaagaaaacctggcgctggtggcgatcatcggcaaccagctgtcgcgcgcctgcggcgtgggcaaagaggtgttcggcgtgctcgatccgttcaatatccgcctgatctgctacggcgccagcagctataacctgtgcttcctggtgccgggcgaagaagccgagcaggtggtgcgtaccctgcatcacaacctgttcgaataagtcattatccctgattgcgggcgcagcatgctgcgcccctgcgtctaaaaaatccgttcaaaacctgcaggggttcagcatgttgagcccgcaataaaaacacaaccacatccaccgttctcaatctggctaaggaaaacctgcatgctggcactactcacgcgcttattccccctctgggcgatactgctgtccgtcgccgcttattacacgccgaccacctttaccggtatcggcccctacgtcagcccgctgctgatgctgatcatgttcgccatgggcgtcacgctgcggctcgacgacttcaaacgcgtgctggcgcgccccggcccggtggcggcaggcatcttcctgcattatctgatcatgccgctggcggcctggatcctggcgatgctgttccgcatgccgccggctctgtccgccggcatggtgctggtgggcagcgtggccagcggcaccgcctccaacgtgatgatctatctggccaagggtgacgtggcgctgtcggtgaccatctcggcggtctcgacgctggtgggggtgttcgccacgccgctgctgacccgtctgtacgtcgacgccaagatcagcgtcgatatcatgggcatgctgttgagcattctgcagattgtggtgatcccgatcggcctgggcctgatcgtccaccataccctgaccaaggtggtgaaacgcatcgagccactgttgccggcgttgtcgatggtgtgcattctggcgatcatcagcgcggtggtggcgggcagccaaagccatatcgcttcggtcggcctggtcgttatcatcgcggtgatcctgcacaacggcatcggtctgctgagcggctactggggcggtaaactgttcggtttcgacgagtccacctgccgcacgctggcgatcgaagtcggtatgcagaactccgggttggcggccacgctgggcaaaatctacttctcgccgctggccgcgctgccaggcgcgttgttctcggtctggcacaacctctccggttcgctgctggcaggttattggtccggccgccctatcaagaagaaataaaccgcctgtagggacgcaaacaattgcgtcccttttctttcctgcgaaatttcgtatttcccactggtcggattgtcataattcccctcatcccctatcatccgtgaaaaataaaaattcagattcttcctatcaatgccgataatgttggcaagaggaagagacgctccactttttttaattaattaagtcaccagggttgcccgccataaaagaagcagcctaattattatttagatatatacccaccgtcttatttgctgcggcaaatcaagatacctcgcaatgtgcatgtcgctcattatttcgggccggccgtcggccgcccgtggttaacctcatggattgggctggctgccccggcggcctctcagaatggattacaatgataaaaaaaatcaccgccttgatactgctggtcagcacggccctttccgccgaaaccctgccggactcccacatgatgatggacatgtcgatgggggaatcacggcgcgcgttgcaagacagcacgcgtgaagtcaaccagttgattgagcaacgccgctaccagcagctgaagcaacagcgcctgctggcggaaccggaaccggccgcgcccgcactgccgcagtccgcgcagtgcctgccgatcgccggcgtttatctgcaaggcattaccctgctctcaccgggtgatttatctgcgctgagcgcgctgccggaaaactgcatcagcagcaacgatatcaatcgcttgacccgtgaattaacgcgcctttatgtgcaaaagggctatatcaccgcgcgcgtgcaaattgttcgccctaattcacaaggagaattggggttaagcgtgacggaaggatttatcgagaaaatagaaggcggcgatcgctgggtcaacagccgtttattatttccggggctggaaggcaagccgttgaaattaaccgagctcgatcagggattggatcaggccaatcgtttgcaatcaaataccaccaagctggatatattgcccggccgccaggttggcggttcggttattcgtttgcgcaatcagcatgccaagccctggctgattaccgccggcacggataattacggccaaaaaagcaccggccggtggctggcgcgcgccactgccacgttggacagcccgtttggcctgtcggactttgtcagcctgaacgccaacagcacgctggaaaacccggctcaccgctacaatcgcgcctacaccctgctctattcgctgccgtacggcgcgttcaccttcagcgggttcgccagcttctcgtcctatgagaaccaccagcagctgccgcacaacgtggtcaaactgcacggtcagacccaacagtacgggctgcgcagcgactacgtgttttatcgcgaccacgatcagatagacagcttgagcggccagctgacctacaagcgcatcgacaactacttcgaaagcgtgcgtcttgaggtcagcagcccaacgctgaccctggccgagctgagcgccagccacctgcaaattctgcccaatggcgtgttcagcgccaacctcagcgtcgagcagggcctgccctggctgggcgccgatcgccacccgagttcggtgcacctcgacagccagttcaccaagggcaagctgttcgccaacctgagccagcgcctccagctgggtggcgccacctatcagctcaacaatctgttctacggccagtacagccgcgacccgctgcccggcgtggagtggcttagcctcaccgatcgcagcgccgtacgcggctttagccgcagcacccagtccggcgacaacggctggtatctgcaaaatacgctgtcccgcagtttcaatctgggcgccaccacgctgacgccgcgccttggcgccgacgttggccgcattctgccgcgtcaggacaactcgggctggcgcagcagcgccggggtgagcagcggcgccacgttacgctaccggcaggcgctggtcgatctcgaggtcagccgcggctggattttgtctaaccacgccacgcctgaagatcccgttcaggtgttggcccgcttttcttacaccttttaatcaacagttttgcaggaccccacggcaatatacggagatacatggatgaaaaataataacttcagactttcggcggcaggcaaactggccgccgcgctggcgattattctcgccgcttccgccggcgcctacgccgcagagatcgtcgcggccaacggcgccaacggccccggcgtctccaccgccgccaccggcgcacaggtggtcgatatcgtcgcgccgaacggcaacgggctgtcgcacaaccaatatcaggacttcaacgtcaaccagcccggcgcggtgctgaacaactcccgcgaggcggggctgtcgcagctggccggccaactgggcgccaaccccaatctgggcggacgcgaagccagcgtgatcctcaacgaggtgatcggccgtaacccgtcgctactgcatggccagcaagagatcttcggcatggcggccgactacgtgctggccaacccgaacggcatcagctgtcagggctgcggattcatcaataccagccattcctcactggtggtcggcaacccgctggtggaaaacggcgtgctgcagggttacagcaccttcggcaaccgcaacacgctgagcctcaatggcaccctgaacgccggcggcgtactggatctgatcgcgccgaagatcgacagccgcggcgaagtgatcgtgcaagatttcaaacattcgaatggtaaagtgacctcggcgacgatcaacgccatcagcggccttaaccgggtagcgcgcgacggcacggtgcaggccagccaacagacgccgaccgcgctggacagctactacctcggcagcatgcaggccgggcgcatcaacatcatcaacaccgcgcagggcagcggcgtgaaactggccggctcgttgaacgccggcgatgaactcaaggtgaaagcctatgatatccgcagcgaaagccgcgtcgacgacgccagcagcaacaaaaacggcggcgataactatcaaaattaccgtggcggcatctacgtcaacgatcgcagcagcagccagaagctgacccgcaccgagctgaaaggcaagaacatcagcctggtggcggataatcatgcgcacctcaccgccaccgatatccgcggcgaagacattacgctgcagggcggtaagctgacgctcgacggccagcagctgaagcagacgcaaggccataccgacgatcgctggttctactcctggcaatacgacgtcacccgcgaacgcgagcagctgcagcaggcgggcagcaccgtcgccgccaacggcagcgccaaactcatcagcacccaggaagacgtgaagctgctgggcgccaatgtcagcgccgagcgtgcgctgagcgtcaaagcggcgcgcgacgtacaccttgccgggctggtggagaaggataaatccagcgagcgcggctaccagcgcaatcacacctccagcctgcgcaccggcagatggagcagcagcgacgaaagcgaaagcctgaaggccagcgaactgcgcagccagggcgaactgacgttgaaagccggtcgcaatgtctcgactcagggcgccaagatccatgcccagcgcgatctgacgatcgatgcagacagccagatccaggtcggggtgcagaaaaccgccaacgccaaagcggtacgcgatgacaaaacctcctggggcggcatcggcggcggcgacaacaaaaacaacagcaatcgccgcgagatcagccacgcttccgagctgaccagcggcggcaccctgcgcctgaacggccagcaaggcgtcaccattaccggcagcaaggcgcgcggccagaaaggcggcgaagtcaccgccacccacggcggcctgcgcatcgacaacgcgctgagcaccaccgtggacaaaatcgacgcgcgcaccggcaccgccttcaacatcaccagcagttcgcacaaggccgacaacagctaccagagcagcaccgccagcgagctgaagtccgacaccaacctgacgctggtcagccacaaggatgccgacgtgatcggcagccaggtcgccagcggcggtgagctgagcgtcgagtcgaagaccggcaacatcaacgtcaaggcggccgagcggcagcagaacatcgacgagcagaagaccgcgctcaccgttaacggctacgcgaaagaagccggtgacaagcagtaccgcgccggtttgcgcatcgagcacacccgcgacagcgagaaaaccacccgcaccgagaatagcgcctcaagcctcagcggcggcagcgtgaagctcaaggcggagaaggacgtgaccttcagcggttctcaattggtcgccgacaaaggcgacgccagcgtcagcggcaacaaggtttcgttcctggcggccgacgacaaaacggcctcaaacaccgagcaaaccaagatcggcggcggtttctattacaccggcggcatcgacaaactcggcagcggcgtggaagccggctacgagaacagcaaaacccagacgcaaagcagcaaggcgatcacctccggcagcgacgtcaaaggcaatctgacgatcaacgcccgcgacaagctgacccagcaaggcgcgcagcacagcgtcggcggcgcctatcaagaaaacgccgccggcgtcgatcaccttgccgctgccgacaccgccagcaccaccaccaccaaaaccgacgtcggcgtgaacatcggcgccaacgtcgattacagcgccgtgacccgtccggtcgagcgcgcggtcggcaaggcagccaagctggacgctaccggcgttatcaacgacatcggcggcatcggcgcgcctaacgtcggcctggatatcggcgcacagggcggcagcagcgaaaaacacagcagcagctcgcaggcggtggtcagctcggtgaaagccggcagcatcgacatcaatgccaaaggcgaagtgcgcgatcagggcacgcagtaccaggcgagcaaaggcgcggtcaacctgacggcggacagccaccgcagcgaagccgcggcaaaccgtcaggacgagcagagccgcgacacccacggcagcgccggcgtgcgcatctacaccaccaccggcagcgatctgaccgtggacgccaagggcgaaggcggcacccagcgcagcaacagcagcgccagccaggcggtggccggctcgatcgacgcggccaacggcatcaacgtcaacgtgaaaaaagacgcggtctatcagggtaccgcgctgaacggcggcagcggtaaaaccgccgtcaacgccggcggcgatatccgcttcgatcaggccagcgacaaacagagcgagaaccacagcggctttaacgtcaaagcgtccgccaaaggcggcttcaccgccgacagcaaaaacttcggcgccggtttcggcggcggcaccaacaacggtgaaagcagcagcagcaccgcgcaggtcggcaacgtcaacggccagggtgtggcgctgaaggcgggccgcgatctgacgctgcagggcaccaacgtcaagagccagggcgacgtcagcctgaacgcgggcaacaaggtcgcgctgcaggcggcggaatcgacccaaacgcgtaaggaaagcaagctgtccggcaatatcgatctgggcgccggcagcagcgacagcaaggaaaaaaccggcggcagcctctccgccggcggcgccttcgacatcgccaaggtcaatgagtccacgaccgagcgccagggtgccactatcgcctcagacggcaaggtcaccctgtccgccaacggcaaaggcgatgacgcgctgcatctgcagggggccaaagtcagcggcggcagcgccgcgctcgaagcgaaaaacggcggcatcctgctggaatccgccaagaacgagcagcataaggacaactggaatctgggcatcaaagccaacgccagaggcggtcaaaccttcaacaaggacgcaggcggcaaggtcgatccgaacactggcaaagacacccacacgctgggcgcaggtctgaaagtcggcgtggagcagcaggataaaaccacccacgccaataccggcatcaccgcgggcgacgtggcgctcaacagcggcaaagacacccgccttgccggcgcgcgcgtcgacgccgacagcgtacagggcaaggtgggcggcgatctgcgcgttgaaagccgcaaagacgtcgagacaggcgtgaaggtggatgtggatgccggtctgagccacagcaacgatccgggcagtagcatcacctccaagctgtcgaaggtcggcacgccgcgctacgccggtaaagtgaaagagaaactggaagccggggtgaacaaagtggccgacgccaccaccgacaagtacaacagcgtggcgcgtcgcctcgatccgcagcaggataccaccggtgcagtcagcttcagcaaggctgacggcaaagtcacgctgccggaaacgccggccggcgaaaaaccgcagggcccactgtgggatcgcggcgcacgcaccgtcggcggcgcggtgaaagacagcatcaccgggccggcgggtcgccaggggcagctcaaggtcaatgccgacgtggtgaacaacaatgcggttggcgagcagtcggcgattaccggtaagcacggcgtggcgctgcaggtcggcggccaaacccagctgaccggcggcgaaatccgcagccagcagggcaaggtggaactgggcggtagccaggtcagccagcaggacgtcagcggccagcgttatcagggcggcggccgcgtcgatgcggccgccacggtaggcggactgttaggcggcgcggcgaagcaaagcgtcgacggcaacgtgccgttcgccagcggccatgcctcaactcagcaggcggacgccaaagccggcgtgttcagcggcaaataacgctctcccctacgcaacgcccccggttttccgggggcgtttttttttacagcgtgcttggggtgtcttcccagtcgcgatcgtcgtctttcgcatcctgatccaacacgttgtaggccacggcgcaaaacagcgagttcaggcgcttcatgtcccccaacaatcccaaatgcagcgaactggtctcgatgctctgcacgttttgctgatgcaaacgatcgacgtgcgcgtgcgcatagcggcgatccagaatgcggaagcggtgcttggaacgacgcaggcgtttggcgctggtgacgtcgccggacaggaacaccgacagccccagacgcaggttgccgatcagccgttcgtgcagcccgtccagttccgccaatccttccgccgagaaggcgcggcgcgcggcgtgcgatttggcgcccacgtcgccggccatgcgctcgatgatgtcgcccgcctgttccaggttgagcgccatttcgatgatttccgcccagcggcgcgaatcttcctcgcccagatcttccttctggatctgcgccagatacagcttgatggcggtgtacagcacgtcgacgtcatcgtcgagtcgccgcacctctttatccacgccttgcttaccgtgcagcacttcgcgctgcaggatcatcatgtgttccaccacgtcgcccatgcgcaacgtttcgcgcgccgcgttggccagcgccagcgtcggcgtatccagcgcgctggcgtccagatgacgcggccgcatgcgcgggtcgtcggccgccacgtcgacgatcagccgttcgcacagcgtcgccatcggcccggccagcgggatcatcaccagacaacggatcaggttgtagaacacgtggaaatagatcaccagctcttcgctgccgcccggcagttgagccatcacatccgccagataggagacgaacggcaacaccaggatgcagcccaccaatttgaacagcaggctgccgagcgccacgcgccgcccggcggcgttctggccgctggcgttgatcatcgccagcaggccgctgccgaggttggcgccgatcaccagacagagcgccaccttcagcgaaatcacgccggtggcggtcagggtggcggtcagcagcaccgcggccaggctggaatagctgacgatggcgaacagcgcgccggtcagggcgtccagcatcacatcgccggtcagcgacgagaacagcactttcaccccggccgcctgggtgatcggcgtggcggcggccacgatcagttccagcgccagcacgatcagccccagaccgatcagaacgcgtccgatctggccgatccgcatctgtttgcggctgaggaacaggaagacaccgaccaggatcagcagcggcgacagccaggaaagatcgaaggtcagcacgcgcgccatcagcgcggtgccgacgtcggcgcccagcatgatcaccagcgcaggcgccagccccaccagcccctgcgcgacgaaagaggtcaccagcagcgcggtggcgttgctgctttgcaccagcgcggtcacgccgatgccggaaacgaacgccagcggttttttctcaacgctgtcgcttaacacgcgccgcagattggcgccataaacccgcataatcccggtgcgcacgatgtgggtgccccacaccaacagcgccacggacgaaagcaggtgaagaagggtcagcacggaagatacgctccattaacgcccggccaaaggaggctgatacccgatgcctgtcacgcgaagcacagaggcgagccaaaggatgacgggtacagcgcgcggtcccgcctgccgggcgtgggtctggcaggacagcgggcgggcggcagaccgcagaagagaagggttaaggcggcggtgggagagccccggcgccgcgctgcgaagtcatgcaacttcccgcaatacaacaggttccaagtgtagcccaatttccgcgccgtcgggccgcagatcggccaccgaacggttgagcacgtcaaccagcaactctacctcgcgaacctgaatccgatagcgtaccacattcccgagcaaactgtggccaaggatcaccccgccgatcccctgtccggccggcaacagcccgatagactctgggcggatcgccaccttgccggcatagctgcgcccggtcagccggccggcctgttcggcgctcagcaggttatagttgccgataaaaccggcggcgaaggcgtccgccggctgggtatacagggtttccgcatcaccgctctgcacgatctgccccttgttcatcagtacgatgcgatccgacagggtcagcgcctcttcctgatcgtgggtgacgaagatcgccgtcaggttcagctcgcgttgaatgcgccggatctgctcgcgcagatgtttgcggatgcgcgcgtccagcgccgacagcggttcgtcgagcagcagcagacgcgggcgcgtgaccagcgatcgcgccagcgccacgcgctgacactggccgcccgacagctgatgcggataacgcttcgccagatcgctcagctccaccagcgccagcgcctcctgcacccgctggccgatctgcccggccgccagcttctgcattttcaggccgaaggccacgttgccttccaccgtcatattgggaaacagcgcatagctttggaacaccatgccgatgccgcgcttttgcggcgccagcggcaccagatcctggccctgcagtaaaatttgcccgctgtcgaccggagtcaggccggccagacagcgcaacagcgtcgacttgccgcagccgcttggcccgagcagggtgacgaactccccctcttcggcggtgaaatcgatatcctgaaacacctgggtttggccatagtgtttgttcaggcgggtgacgttgagataagccatcgggttaacctttgtttttattcagcaggttcgccagccaggtgacgagcagcaccacggcgaaataggagatgaccagcgcgctggtgaaatgcccgctgccgttgcgcatgttgaacaggtagacctgcagcgtttcatactggctgcccaccagcaggttggcgaacacgaactcgccgatcaggaacgagaacgacagcaacacggcgatcgttccgcccttgcgcaaatttggcagcaccacccacagcgccgcccgccaggtgctggcgccgagcaagtgcgcggcgtccatcagatcgcgcaggttgatcgcctgcatgttgttgctgatggcgcggtagataaacggcagcgcgatggtgaaataacagcccaccaaaatccagggggtgccgagcagcggcagcggatcggcggcgaacagttgcatcagccccaccgccgacaccaccggcggcacggcgaacggcagcagaatcagcacgttcattaccgcgtccagcttggggaagtagtaagcgatcacaaacatcgccggcaggatcaccaccaccgacagcagcaacgtgccgaagcagatcagcagcgagtgccacagcgcctgcaaaaagcgcgggtcgctccacagcgccgtcagccacttcagggtaaaaccgtccggcaaaatggtggcgccccactgggtagccagcgcgtaaatcagcgtcgccgccagcggcagcagcaggatcaacagcagcaggccggtcaccgtgcggtggtacaagcgttcaacacgcgacatgagcattctccagccggttatgagcgcgcattgaggtagctcctgcgcagcatccattggtggatcaccgtgataaacgccatcatcaccaccagcagcatcgccagcgcgctggccaggttcggatcgagggagatgtcccccgccaccagcgccgagatgcggatcgggatcacgttgaagttgccggtggtcagcgcatacaccgtggcgtaggcgcccagcgcgttggccagcaggatgacgaaggtgcccatcagcgccggcgccagcaccggcaggccaatatgccgccagtagcgccaggggccggcgccgagcagcgccgccgattcgcgccagtcggcgcgcagcgcgtcgaatgccggatacagcagcagcaccccgagcgggatctggaagtaggtatacagcacgatcaggccgctcttcgaatagaggttgaagctctccatcaggccgtatttgcgcagcagcaacgtcaggcaaccgttcagccccagcagaatgacgaaggcgaacgccagcggcaccccggcgaagttgctggtcatgttggtgaacgacattacgaagtcatgaaaccgcgtctggccgagctgacgcagtgagtaactgccaactaatgcgatcagcaagccgtagacgctcgaccatagcgagatctccagcgagaactgaaacgcctgcaggtagaacggcgaggtgaggatatcgacatagttgccccacccccagccgctggtctcgctgaaaaagctgtgaacggcgatccacaccagcggggcgatctgaaacgcgccgaacagcacgataaacggcagcaggcacagcgcggcgatccatttggttttgctgttcatcgcgcatcctgcgccagcagcgcccggcagcgcggcttgtcgtgcggcgcctgcaatagatcgcagatcgtgccgcacagctcggtttgctgcggatcggcgtcatccaggctgaagcccgcgccgaatacgaacagcggcacctgacgctcttccggcaatacgccgccgtggctgcgatcgtcgttcatgccatggtcggcggtaaccagcacctgatagccggccgccagccactcgggcagatagcgcgacagcgagccgtcggcgcgccgcgccgcgttgcggtactgcggcgaagagaggccaaagcggtggccggcgtcgtcgatgttcatcggatggatcaacagaaagtctggctgatgacgcagacgcaggctttcggcgtcgtcaaacagatggctgtcgggataaccgtcgtcgtaatagaaatgcccgtgttgaatcggcagctcgggggcgtcggtatggcggtcgcgcgcggcgtcgaacggcgtgcggttatacaattcgctgaaccagtggtaagcggcggcggcggtgctcagcccggcggcgcgcgcataatgaaacacgctttgttgatgagaaaggcgcgagacgtgattgtgcaccacgccgctctccaccggcgtgacgccggtgagaatgcattcatacagcggccgggagagcgagggcaactcgctctccagcaggtacaaccgcccgcgtcccgccgcgcattcggcctgcagataccccatagcgtcgtgcgccacccggtagttgaggccgtccagcagcacgaggatcgttttcatggtgcgttaactcactgctgcataaacataatgacgttttcctgccacaggcgcggcagcgctttggcgctctgttcccaggccgccggatcggcgatcggatgcgcattcttgtactgctcggccggcagcagcttggccttgacgtcgtccggcagcgtcagatgttcggcgcggatcgggcgggcatagccgcgcgccaggttgatctggccggcgtcggagaagatgtattcgcgcgccagcttggcggcgttcgggtgcttggcgtatttgttgatgatggtggtgtagccggaagtgatcgaaccgtccgacgggatcagcacttcaaaacgggttttgtcgatctgatcgcggtagttcaggccgttgaagtcccacaccacgccaacctgcacttcccctttctccagcgatgcgatcaccgggttactcaggctcaggcggccggccttggccagcttgccgaagaattccaggcccggcttgagatttttctcgttgccgcccatcgcgtaggtggccgccagcacgccgctggccgcctgcgacgcggtgccgacgtcgccgatggtgacctgatagctgcccttgagcagatcggcccagctgtgcgggatgtctttcacctgctgcttgttgatgatgaaggcgatggtgccggtgtaagccagcgcccagtggccgtctttgtctttcgcccactccggcacctgatcccaggtagacggtttgtacgactgcgttacgcccttctgcaccgccaccgggccgaaggccgcgccgacgtcaccgatgtccgccgtggcgttgttcttttccgcatcgaatttggcgatctcctgtgcggagctcatgtcggtatcgacatgcttcaggccgtacttgctcaacagatcttgccaggtgcctttccagttggcccagctgtccggcatgccgacgctgttgacttcgccttctttcttcgcggcctgctccagcgccgccagatcggtatccgcggcccagctcatctggctggataacacgatggcactggttaacacagaagcgcacaaacgtttcataactgatgctccaggtggtagtgtggggatggctggactagtccagcaaggaccaaaccaatctaacggacgaatgtgataattatatgtcagcttaaaaaagcgacagttttatcacccattgcaacggcgaaaacgcgacgctggtctaccttaaggaaggccaaacgcactgaaacgggacacccgctgtatgagtgaagcaccgacgaccgtcgccaccatctgccaaacgctgagcgcccgcatcaccgccggcgagttcgccgcgggcggcaagctgccctccgagcgcgccctgagcgaacagttcgccaccacccgcattaccttgcaggaggcgctcggccagctggaggcgcagggcgtcatctaccgccaggtgcggcgcggctggtttatctcgccgccacgtttgatctacaacccgttgcagcgcagccattttcacgccatggcgcagcagcaggggcgcgccgcccataccgaagcgatcgacagcgcggtcgtcacacttgacgcgccgctggccggccgcctggcgctgcctcccggcgcgcaggcctatcgcattcgccggctgcgctacatcgacgggcgcgcggtgctgtactgcgagcactacctcaatcctgcctatttccccggtattctggacgaagatctgacccagtcgctgaccgcgctgtacgccgcacgctacggcattcactacggccgggtacgtttcgacatgctgcccaccctgctgccgcagcaggccgccgccatgctgaaggtgacctacggcagcccggcgctgttcattacgcgggtgaatcgcgatcaacatgaccgggtgatcgattgcgacctggagtattggcggtacgacgcgctgcacatcgatgtggaagcgctgtaaatgacaagggcgcatcgctgcgcccttaaagaggaaggtcagtcggcgtcgtagccgaggtttggcgccagccagcgttcgacctcgctcacgctcatccctttacgcgccgcgtagtcttccacctgatcgcgctggatctgcgccaccgcgaagtacttgctctcaggatggctgaagtaccagccggacaccgctgcccccggccacatggcgaaggactccgtcagttccatgccggtgtggcggttgacgtccagcagctgccagatggtcgctttttcggtgtgctccgggcaggccgggtagcccggcgccggccggatgccctgatagttttcgcggatcagttcttcgttgctcagattctcgtcggcggcataaccccagtgcaacttgcgcacctgttcgtgcaggtattcggcgaaagcctccgccagacgatccgccagcgccttgaccatgattttgttgtaatcgtcgtgctgtgcgtcgtacgccgccgccagcgcgtcctcctccagcccgccggtcaccgcgaaggcaccgaagtagtcggccttgccgctgcttttcggcgccacgaagtccgccaggcagtagttcgggaagtcggttttttccgtctgctgacgcagatggcggctcaccgccagcacctcgctgcgctgttcgtcgcggtacacttccacgtcgtcgccgacgcggttggccgggaacaggccgtaaacgccgcgcgggttgaggctgcgctcggcggccagccgatccagcatctgattggcgtcgtggaacaggcgcttggcctcttcccccaccacctcgtcttccaggatgcgcgggtatttgcccgccagcgaccaggtcatgaagaacggcgtccagtcgatatagtggcgcagcgtctcgatgccggccgacaccgggaatacgccaagctgccgcggcgccggcggctgatagtcggcccagtccagcgccatggcgttggcgcgcgccttgtgcaaatcgaccggcggcgtgcgcggttttttgcgcgcgtgctgaatgcgcaccgtttcatactctttgcgggtgcgcgccacaaactcatcgcgctgggtggcggacagcagcgccgccaccacgcccacggtgcgcgaggcgttttgcacgtaggtggtcgggccgctgtagttctgctcgattttcaccgcggtgtgcgccttggaggtggtggcgccgccgatcagcagcggcagggtaaagccctggcgctccatctctttggccacgttgaccatctcgtcgagcgacggcgtgatcagccccgacaggccgatgatgtcgacgttctcctcgcgcgcggtgcgcaggattttctccgtcggcaccatcacgccaagatcgacgatttcatagttgttgcactgcagcaccacgccgacgatgttcttgccgatgtcgtgcacgtcgcccttcaccgtcgccagcaggattttccccgcggaggtgccctgctgcttgctggcctcgatgtacggttccaggtaggccaccgcctgcttcatcacgcgggcggatttcaccacctgcggcaggaacatcttgccctcgccgaacagatcgccgaccacgttcatccccgccatcagcggcccttcaatcacttcgatcggccgttcggcctgctgccgcgcctcttcggtgtccaactcgataaactcggtgatgcccttcaccagcgaatactccagccgcttttccaccggccagccgcgccactccgcctgctgcaccgccgcttcgccgtctttgctgccgcggtacttttccgccagctccagcaggcgttcggtgccgtcctcgcgacggttgaggatcacgtcctctaccgcctcgcgcagctcgccaggcagatcgtcataaatcgccagttgcccggcgttgacgatgcccatgtccatgccattgcgaatggcgtgatacaggaacaccgcgtggatcgcctcgcgcaccggatcgttgccgcggaacgagaacgacacgttggacaccccgccggagatcatcgcgtgtggcagatgggttttgatgtcggcgcaggcttcgataaagtcgacggcgtagttgttgtgctcttcgatgccggtggcgacggcgaagatgttcgggtcgaaaatgatgtcttccggcgggaaaccgacgcgttcggtcaaaattttataggcgcggcgacagatctcgaacttgcgctcgcgggtgtccgcctggcccacttcgtcgaacgccatcaccaccaccgcggcgccatagcggcgcaccagccgggcgtggtggataaaggcctcttcgccctccttcatcgagatcgagttgacgatgcccttgccctgaatgcatttcaggcctttctcgataacggaccacttggaggagtcgatcatgatcggcacccgggcgatatccggctcgccggcgatcaggttgaggaaacgcaccatcgccgcttcggcgtcgagcatcccctcgtccatgttgatatcgatgatctgcgcgccgctctcgacctgctggcgcgccacgtcgagcgcctcgttgtatttttcttctttgatcaggcgtttgaatcgcgccgaaccggtgacgttggtgcgctcgccgacgttgacgaacagggtgctggcgtcgatggtcagcggttccagaccggccaggcggcaggcgaccgggagctccggcagccggcgcggcggcacgccctcgaccgccttggccatcgcggcgatatgttccggcgtggtgccgcagcagccgccgatgatattgaggaagccggcctgcgcccactccccaacctggcgcgccatctcggccgcatccagatcgtactcgccgaaggcgttcggcaaaccggcgttcgggtgcgcggtgacgtaggtctccgagatgcgcgccagctcggcgacgtactgacgcagctcatccggccccagggcgcagttcaggccgaaggtcagcggcttgacgtggcgcagcgaattgtaaaacgcttcggtggtctggccggacagggtgcggccggaggcgtcggtgatggtgccggaaatcatgatcggcagttccactcccagcgcttcgaattcagtttccaccgcaaaagcggcggccttggcgttgagggtgtcgaagatggtctcgatcatgatcagatcgacgccgccctccaccagcgcgcgggtcgattcgcggtaagccgccaccagttcatcgaacgagatgttgcggaacgccggatcgttgacgttcggcgagatggacgcggtgcggttggtcggccccaacaccccggcgacgtagcgcggtttttccggcgtgcgcgccgtccattcgtcggcgcaggcgcgcgccaggcaggcggcctgatagttaatctcggcggacagcgactccatatggtagtcggccatggcgatggaggtggcgttgaaggtattggtctcaaggatatcagcgcccgcctcgagataggcgtaatgaatggcggtgatcacttccggcttggtcagcaccagcagatcgttattgcctttcagatcgctgcgccagtcggcgaaacgctcaccgcggaaatcgcgctcatccagacggtagctctggatcatggtgcccatgccgccgtccaacaccaaaatgcgctgcgctaactggcggcgcagttgttctactcgattcgtcactgtaaccccttccattgccatccagcccattgctcaactgccgcaaacaccaacgagtcatcctagcacagcttgtaaggacaaagggccaggcgacaattgagagtttttcaggttgtgcgccaacacctccgatgagctgacggcggcttgcaattcatcggcaaaaaacgaaaatgaattccatcatacggaaaaaggaatctcacccatggccacccctgctcccgccaagcgcggcaagaagccccgcgcagcagcccccgccgccagtgcggcgaccggtcaggtacaatcgttgacccgtggcctgaaactgttggaatacatttcggaagcccagggcaacgtggccctgaccgatctggcccagcaagccggcctgccgaactccaccactcaccgcctgctcaccaccatgcagcagcagggattcgtgcgccaggtcggcgatctcggcctgtggaccatcggttcgcacgcctttgtggtcggcagcagcttcctgcaaagccgcaacctgctggcgatggtgcatccgacgctgcgccgcctgatggaagagtccggcgaaaccgtcaacctggcggtgctggataccagcgagtaccaggcgatcatcatcgatcaggtgcagtgcacggcgctgatgcgcatgtcggcgccgatcggcggcaaactgccgatgcacgcctccggcgccggtaaagcattcctcgccaccctgccggacgatcaggtgaccaaactgctgcacaagaaaggcatgcacacctacacgccgcataccctgacgccgcacaacctgaaagagggactggcgcagatccgcaagcagggcttctcctttgacgacgaagagcacgcgctcggcctgcgctgcgtggcggcctgcatcttcgacgaacaccgcgaagccttcgccgccatttccatctccggcccggtgtcgcgcatcactgacgatcgcgtgatcgagctgggcgcgctggtgatccacgcggcgaaagagatcagcctggcctacggcggcgtgcgttaatccgatcatccgaggggcgccccagcgcgcccctgctcccctgccatgctctgttgtcagcatgtaacaggctgtcggcatcctgtttagcgcacaggaaaaaagcttgaagccgatcacagttaacgatcctcacggcgaaagcccattgcaaccgctcaaacttccttcgacaatgttaccgataacatgttaccggtaacaatcaaactgaacgaaggtaacgtcacccggtgttttggagctaagccatgaccaacaatcaaaatcgcatttacgtcgttatgggcgtttccggcagcggcaagtccgccgtcgccgccgccgcggcccgccaactctccgccggcttcctcgacggcgacttcctgcacccacgcagcaacatcctgaagatggccgccggcgaggcgttgaacgacgacgatcgcgcgccgtggctggccgcgctcaacgacgccgccttcgccatgcagcgcaccaacagcgtgtcgatcatcgtctgttcggcgttgaaaaagcagtatcgcgaccgcctgcgcgccggcaacggcaacctgtcattcatctatctgcacggtgagttcccggtgatcgaatcccgcctggcggcgcgcaacggccacttcttcaagccgcagatgctggtcacccagttcgccgcgctggagcaaccgggcgccgacgagaacgacgtgatggcgatcgacatcaatcagccgctggacgcggtgatcgccgataccgtgcgccatatccagagcttcctgccgcaggacgtgtgcgcgtgagtaccgtaacgctggtcggtaccgcagtcggctcggttttactgctgttattcctggtgatgaaggcgcgcatgcacgccttcgtcgcgctgatgctggtgtccatcgccgccggcattttctccggcatgccgctggaacacatcgccgacaccatgcaaaaaggcatgggcgacacgctgggcttcctggcgatcgtggtggcgctcggggcgatgttcggcaagatcctgcatgaggtcggcgcgctcgatcaaattgcggcgcaattgctgaaacgattcggacaaagcaaagcgcactacgcgctcggcatcgccgggctgatctgcgcgctgccgctgttcttcgacgtggcggtggtgctgctgatcggcatcgtgttcgccgtggcgcgccgcaccgacggcaatatcgtcaagctggctattccgctgttcgccggcgtggccgccgccgcctccttcctgctgccggggccggtgccgatgctgctggcgtcgcagatgaaggccgatttcggctggatgatcgccatcggcctggtagcggcggtgatcggcatgctgatcgccggcccgctgtacggcagctttatcagccgtttcgtcaactggccgatgccgccggaagagaatgagccgacgctgaccaagggcaatctgccgtcgttcggcttcagcctggcgctggtgctgtgcccgctggtgctggtcggcatgaaaaccatcggcgcgcggctggtcacccccggctcgcagctgcagcagtggctggagtttatcggccacccgttcaccgccatcctgctggcctgcctgatcgtgatttacggtctggcgaagccgcgcggcatgagcaacgaacagacgctggccatctgctccgccgcggtgcagccggccgggatcatcctgctgatgaccggcgccggcggggtgttcaagcagatcctggtggattccggcgtcgggccggcgctgggtgacgccatgatcggcgccggcctgccgatcgccgtggccgcctttgcgctctccgccatggtgcgggtgatccagggctcggccaccgtcgcctgcctgaccaccgtcggcctggtgctgccggtcaccagccagctcgggcttagcggcgggcaactggccgcgctggccatctgcatcgccggcggctccatcgtgctgagccacgtcaacgatgccggcttctggctgttcggcaaattcaccggcgccaacgaactgcaaacgctgaaaacctggacggtgatggaaaccattctgggcagcgtcggcggcgccatcggcatgattgcattcacgatgttttaaatcctaaatcgcccccggccttgcacaccagggctgcaaatcacccccgggggcaccgccacaggcggcgactataacaacagcaatgtgaggaaggcatgattaatccaaccttgtcccgtgtcacacagcgcatcatcgaccgttcccaggccagccgcgccgcctatctggcgcgtatcgaggcggcccgctcccaaaccgtccaccgcgcgcagctcgcctgcggcaacctggcccacggtttcgccgcctgtcagcccgatgacaaggcgtcgctgaaaaacatggtgcgcagcgatatcgccatcatcaccgcctacaacgacatgctgtcggcccaccagccgtacgaacattacccacagcggctgaaacaggcgctgaaggcggtgggtgccgtgggccaggtggccggcggcgtgccggcgatgtgcgacggcgtgacccaggggcaggacggtatggagctgtcgctgatgagccgtgacgtgatcgccatgtcggccgctgtcggcctgtcgcacaatatgttcgacggcgcgctgttcctcggcatctgcgacaagatcgtgccggggctggtgatggccgccctctccttcggccacctgcctgcgctgttcgtgccggccggcccgatgagcagcggcctgccgaacaaggaaaaagtgcgcgtgcgccagctgtacgccgagggcaaggccgaccgcctagcgttgctggaggccgaggctgcctcttatcacggcatcggcacctgcaccttctacggcaccgccaacaccaaccagatggtgatggaagtgatgggtctgcatctgccgggcgcctccttcgttcatccggacacgccgctgcgcgacgcgctgaacgacgccgccgcgcgccaggtgacccgactgaccgacaccgccggcaactacctgccgatcggccgcctggtggacgagaaagtggtggtgaacggcatcgtctcgctgctggcgaccggcggctcaaccaacctgaccatgcatctggtggcgatggcgcgggcggcgggcatcatcattacctgggacgatttctcggagctgtcggaggcggtgccgctgctgtgccgtatctatccgaacggcccggccgacatcaaccagttccaggccgccggcggcgtgccgctggtggtgcgcgagctgctgcaacacggcctgctgcacgaagacgtgcataccgtggccggtttcggcctgcgccgctacacccaggaaccgtggctggacaacggccaactggtgtggcgcgaaggcgtggccggctcgctcgacgccagcgtgatcgccagcgtggcccagccgttcgaacatcacggcggcaccaaagtgatggccggcaatctgggccgcgcggtgatgaaaacctcggcggtgcccgccgacaaccagatcatcgaagcgccggcggtagtgttcgacagccagcacgacatcgtgccggcgttcgaagccggcaagctggatcgcgattgcgtggtggtggtgcgcttccaggggccgcaggccaacggcatgcccgagttgcacaagctgatgccgccgctgggcgtgctgatggatcgcggcttcaaagtggcgctggtgaccgacggccgcctgtccggcgcctccggcaaggtgccttccgccatccacgtcaccccggaagcctataccggcggcctgctggcgaaagtgcgcgacggcgatccgatccgcgtcaacggccgcagcggcgagctgcaggtgctggtcgacgccgacgaactggcgcggcgcacgccttgccaacccgatctgagcgcggaacacatcggctgcggccgcgagctgttcggcgcgctgcgcagccagctgtccggcgccgagcagggcgcctgctgtatcaaattttaatcgatagcctggccgcatcgccgcctggcggcggccacagaggagaacgtcagcatgaacaagtggacaacaagcgccgagcagatcctgacggcggggccggtggtgccggtcatcgtgatcaacaagctggaacatgcggtgccgttggcgaaagcgctggtcgccggcggcgtgcgggtgctggaggtgacgctgcgcaccgcctgcgccatggacgccattcgcgccatcgcccaagaggtgccggaagcgatcatcggcgccggtacggtgatcaatccgcagcagctgcgggaagtgaccgaagccggtgcgcagttcgccatcagcccaggcctgaccgacgagctgctcaaagccgccaccgcaggttccattcccttgatcccgggcatcagcaccgtttccgaactgatgcagggcatggattacggcctgcgcgagtttaaattcttcccggcggaagccaacggcggcgtaaaagcgctgcaggcgatcggcggcccgttcccgcaggtgcgcttctgcccgaccggcggcatctcaccggacaactaccgcagctatctggcgctgaaaagcgtgctgtgcatcggcggctcctggctggtgccggcggacgcgctcgaaagcggcgactacgcgcgcatcactgaactggcgcgcgccgccgtcgcgggcgccgaggcctgatttacatcgcagcggtggcggccggcagcgccgccccgctgcgctggctgaaccgctgcttcttgcgataagcaaatacgtcttccacatgcccttcgcggatgcgctgctgcaacccgcgccaatactccgcggtaaacagatcgctgtgcagctcttcaaacacctgccgaatgcgccgatcgccgcacagaaagtggcggaactcttccgggaacacgtcgttgggcgcgatgctgtaccacggctcgctggccaactcatcttccggataacgcggcggcgggatatcgcggaagttgacctcggtcatgtagcaaatctcgtcgtagtcatagaacaccacccgcccgtggcgcgtcacgccaaagttcttgaacagcatgtcgccggggaagatattggcggcggctaactgcttgatcgcgttgccgtactcttcaatcgcatcgcgcatctgctggtcgttggcctgctccagatacagattcagcggcgtcatgcgccgttccatatacaggtgcttaatcacaatgcgatcgccgagatcttccagtttgcccggcacttcgcgccgcagctccgccaacagttccgggctgaggcgcgccttgtcgacgacgaaattttcgtactcttgggtatccgccatacgcccgacgcgatcgtgctctttcaccagctgatagcaggccatcacctgcgcctgcgtcacctctttttgcggggcgaattcgtccttgatcactttaaacacccgatcgaaggacggcagggtaaacaccagcatcaccatgcccttcacccccggcgcgatgatgaactgctcctgcgactgcgccataaaggtcaggtattcgcggtagcattcagttttgccgtgcttctggcagccgatcgccatgtacagctcggcggtggtcttgcccggcaggatctcgcgcagccactcgaccatcgccgccggcagcggcgcgtagaccatgaaataagaacgggcgaagccgaagacgatgctggcctcagccttaccggtcaggcaggcatcgataaacagcgcgcccgactcgctgtggtggatcggcagcaagaacgggtaaacgccgtcggccaggcgcagcttgccgaccagccaggcggccttgttgcgatagaacagttcgttggcgatctgaaaggtggcccccgccagttgctgcggactgaaggcgcgctgcagcgcctgagtgatgtagcgaatatcgcgcgtcaaatcttcccacggcaaccgcagcggcagatcgctcagcacgctgcgcagcatcgccggcagatcgccattggaggtgaaatcgcgcgccagcggacgcggaatgtcgcgaaatcgccgttccggctgcgaactgaacacgaacagcttgtccggcgtcagatcgcgatgcttgaacagccggcagtagaccgagttaaaaaagctttcggctatctcgaaacgcgggtagtccggcagcagatcgatataaaccgctttgacccggctggggaagtcggcgtcgaaatatttctgcccggtgatgcatttgagctgctccaccaccaggccgacatgatggtcatacagatggatgcgctttttcatcgcctgctgcaccgtcggccagtccgcctgctcgaagcgctgctgcgcgccggcggtcacctccaaaaagcggccgtactgcgcatcgaagccctgcaggatcgtctgtgcgatcaacaactccagttttgccgccatccttacccccgccagaaaaagaagcctgcgcatgcaggctccgggtgaaacgtcttcaagcttgccgcatcagaactgctgttcttccgtcgaaccggtcagcgcggtgaccgaagaggcgccgccctgaatgatggtggtgaccttgtcgaagtagccggtgcccacctcctgctggtgcgacgcaaaggtgtaaccgcgatccaccgcggcgaactccgcctgctgcaccttctcgacgtagtgtttcatgccctcgccctgcgcataggcgtgcgccaggtcgaacatgttgaaccacatgctgtggatgcccgccagcgtgatgaactgatacttgtagcccatgtccgacagcgcctgctggaagcgggcgatggtctgatcgtcgaggttcttcttccagttgaacgacggcgagcagttgtaggccagcagcttgcccgggtatttggcgtgaatggcgtcggcgaagcgctgagcggcatccagatccggcgttgaggtttcgcaccacaccatatcggcgtaaggggcataggccaggccgcggctgatcgcctgctcgacgccggcatgggtgcggaagaagccttccgccgtgcgctcgccagtgacgaaagcgctgtcatacggatcgcaatcggacgtcagcaggtcggccgcatctgcgtcggtacgggcgatcaccagcgtcggcacgccgagcacgtcggcggccaggcgagcggcgaccagcttctggatcgcttcctgtgtcggcaccagtactttgccgcccatatgaccgcatttcttcaccgccgccaactggtcttcgaagtgcaccccggcggcgccggcggtgatcatcgctttcatcagctcgaaggcgttcagcacgccgccgaagccggcttccgcatcggcgacaatcggcaggaagtaatcggtgtagcctttgctgcccggctcaatctggttcgcccactggatctgatcggcgcggcggaaggtgttgttgatgcgctcgaccaccttcggcaccgagtccaccggatacaacgactggtcagggtacatggccgccgcgctgttggcgtcggccgccacctgccagccggacaggtagatagcctcgacgccggctttagcctgctgcagcgcctggccaccggtcagcgcgcccaggcagttcacgtagcctttgcgcgccttgccgttcagcaacgcccacagtttggcggcgccgttttgcgccagggtacattccgggttgaccgaaccgcgcaggttgatcacgtcttcggcgctgtaagggcgggtgatgccttcccaacgggccgatttccattcctgttccagctgctggatctgttgagagcgagaggtagacataatttttatcctttcagtcatgtagggttgattgggaaagttcaggccagcagctcatagccgggcaacgtcaggaaatcgattaattcatcttgcgtggtgatgcgctccatcaggcgcgccgcctcttcgaaccggccggcgttaaagcgcgcttcccctacttcttcacgcaccaccaacatctcttcttgcaacatctggcggaacagcgccttggtgaccgggcgcccgtcgttcaggctcttctcgtggtggatccactgccagatagaggtacgggagatctccgccgtcgcggcatcttccatcaacccatagataggcacgcagccgttgccggagatccaggcttcgatgtactgcaccgccacgcggatattggcgcgcatccccgcttcggtgcgttcgccgtcgcatggttccaacagctgcgcggcgctgattggcgcatcctgctcacgcatcacgtccagctgattctggcgatcgcccaatgccttgccgaacacctccatcaccgtgtccgccagccccgggtgcgccacccaggtgccatcgtggccattgttggcctccagctctttatccgcccgcaccttgttcagcacccaggcgtttttctcagcgtctttgctcgggataaacgccgccatgccgcccatggcgaaggcgccgcgcttatgacaggttttgatcaacagacgtgaataggcgctgaggaaaggtttctccatggtcaccgactgacgatccggcagcacgcgatcgccgtgattcttcagcgttttgatgtagctgaagatgtaatcccagcggccacagttcaggccgacgatgtgatcgcgcaggtgatagaggatctcgtccatctggaacaccgccggcagggtttcgatcagcacggtcgccttgatggtgccacgtggcagatcgaaacgatcctcggtaaagctgaagacatcgctccaccaggccgcttcctcccaggactgggttttcggcaggtagaaatacgggccgctgcccttggccaacagctgacgatagttgtggtagaagtacagcgcgaaatcgaacaggccgccggggatggcttcatcacgccacaagacgtgtttctccggcaggtgcaagccgcgcacgcgagcgatcaacaccgccggattcggtttcagttggtagatcttgccggcttcgttggtgtaggagatggtgccgttaaccgcatcgtgcaggttgatttgaccatcgatgactttgtcccagcttggcgccagggagtcttcgaagtccgccataaatacttttacgttggcgttcaacgcattgatcaccatcttgcgttctaccggcccggtgatctcaacccggcgatcgcgcaggtcttgcgggatgccgcggatctgccagtcgccctcacgaatggaattggtttccgaaataaatccaggcagctcgccgcgatcgatattttgctgccagcgggcacgcgccgccagcagctcattgcgccgcggcgtgaatttccccaccagttccgccaggaattcaaccgcttcatccgttaatacctggcgctccgctgcggcgaaaccctgggtaaaccttaactccgtgcctgctatctgttgcgtcatgaccttgctccttcccatcgttgcgcccgagcgaccggcgcattttcatcagaaatcactgtggatcagggcggatgaaacgatcctaaactggtcagatctcatcccgatagctctaagaatactcaacaaaaaacaaaaatcaaaaaccatttccattttattattaaatattttattaacactttattatcaattagttagaacaaataacataaccaacaggtaaggaaactggttccaatagaatcgcaaagataggctaacgcgttgttggccaatggttttttggggaaagtgaccggtaaaaaggggatcgtgcggaggatcaacagcgcggcggcctcgattcagccgccggcaggcagaaaagatcagtcgagagtcggattcatatggcgcagatcgtaaggcgtgatctggtagacgtaatagttgagccaattggaaaacagcaggtggccatggctgcgccaggtggctttcggtgtcagtgcggggttgtcatcggggaagtagttgagcggtacggcaggatcgaggccagcttcgttgtcgcgacaatactccccggccagggtcagggcatcatactcaggatggccggtgacaaacgccaggcgcttatccctgctggcgaacaggtaggcgccggcctgctcggattcggccagaatatccaggtcggtatattggcgaatcacctcggtcgggaaatcggcatagcgtgagtgcggcgccaggaagctttcgtcgaagccgcgcgtcagcaacgcatgctgctgcagcgtttggtgcggataaacgccggagagcttcacttcgcgcgtcatcttgggaataccgtacaggatgttcaacgccgcttgtaccgcccaacacacgaacagcgtggaggtgacgtggtttttggcccagtcaatcacccgttcgatctgcggccaataggcaacatcgcagaaatcaaccagccccagcggcgcgccggtgacaatcaggccatcgaagttctcattctggatatcctcgaagtcgcagtagaagttgttcagatgctcggccggcgtgttcttcgattcgcggctgtcgatgcgcagcagctggatatcaatctgcagcggcgagttggacaacagacgcagaaactggttttccgtttcgatcttctttggcatcaggttgaggatcagcactttcagtggcctgatttcctgtgtttttgcccgcgaggatgtcatcacgaagacattctcaccgcgcaagaaattgaccgcaggtaactcatcaggaacacgaatcggcattgcttaaccctcacacatccatttatacgtttagacttctagatgcccgaagatagcgttttttttcgtcgctgtcgagcattcagcggaaaggtgaaaatgtttcattgcgcagcctgcgccgggatataagcagagggagtaaagcggatgaaaagcaaaaaggccatcctttcggatggcctcttggcttatttgatgcttggcagtgtcctacagtattcgtctcatcctgagactctcccctgcggggccgccgcaagcggcgttaaggcccgttcccgacgggcctttcgcatgcccatgctcgagcagaacaccaaataacagacaaaacaaaaagccccatgctttcgcatgaggcttgttgttttatttgatgcttggcagtgtcctactctcgcatggggagaccccacactaccatcggcgctacggcgtttcacttctgagttcggcatggggtcaggtgggaccaccgcgctattgccgccaagcaaattcttttttctgccgaacttctaaacccactttaaataaagtggtgctgatacccagagtcgaactggggacctcacccttaccaagggtgcgctctaccaactgagccatatcagcacgcttaatttgatgcctggcagtgtcctactctcgcatggggagaccccacactaccatcggcgctacggcgtttcacttctgagttcggcatggggtcaggtgggaccaccgcgctattgccgccaggcaaattcgtttcattccaaccgcttcatcgctgaagcctgtcaatccaatctgtaaacaagctgaatattgtcttggtctcaccaaaacaccttcggtgttgtaaggttaagcctcacggatcattagtactggttagctcaatgcatcgctgcacttacacacccagcctatcaacgtcttagtcttaaacgttccttcaggggccttaaaggcccagggaagactcatcttgaggcaagtttcgcgcttagatgctttcagcgcttatcttttccgcacttagctaccgggcaatgccattggcatgacaacccgaacaccagcggtgcgttcactccggtcctctcgtactaggagcaacccctctcaatcttccaacgcccacggcagatagggaccgaactgtctcacgacgttctaaacccagctcgcgtaccactttaaatggcgaacagccatacccttgggacctacttcagccccaggatgtgatgagccgacatcgaggtgccaaacaccgccgtcgatatgaactcttgggcggtatcagcctgttatccccggagtaccttttatccgttgagcgatggcccttccattcagaaccaccggatcactaagacctactttcgtacctgctcgagccgtcactctcgcagtcaagctagcttatgcctttgcactaacctcacgatgtccgaccgtgattagctaaccttcgtgctcctccgttactctttgggaggagaccgccccagtcaaactacccaccagacactgtcctcaccccggatcacggggccgagttagaacatcaaacattaaagggtggtatttcaaggatggctccacgcagactggcgtccacgcttcaaagcctcccacctatcctacacatcaaggctcaatgttcagtgtcaagctatagtaaaggttcacggggtctttccgtcttgccgcgggtacactgcatcttcacagcgagttcaatttcactgagtctcgggtggagacagcctggccatcattacgccattcgtgcaggtcggaacttacccgacaaggaatttcgctaccttaggaccgttatagttacggccgccgtttactggggcttcgatcaagagcttcgccttgcggctgaccccatcaattaaccttccagcaccgggcaggcgtcacaccgtatacgtccactttcgtgtttgcacagtgctgtgtttttattaaacagttgcagccagctggtatcttcgactggcttcagctccatccgcgagggacttcacctacatgccagcgtgccttctcccgaagttacggcaccattttgcctagttccttcacccgagttctctcaagcgccttggtattctctacctgaccacctgtgtcggtttggggtacgatttaatgttacctggagcttagaggattttcctggaagcagggcatcaactacttctgcaccgtagtgcatcgtcatcacgcctcagggttaatatgcaaccggatttaccaggtcacaccccctacacgcttaaaccgggacaaccgtcgcccggccagcctagccttctccgtccccccttcgcagtaacaccaagtacaggaatattaacctgtttcccatcgactacgcttttcagcctcgccttaggggtcgactcaccctgccccgattaacgttggacaggaacccttggtcttccggcgagcgggcttttcacccgctttatcgttacttatgtcagcattcgcacttctgatacctccagcaaccctcacaggccaccttcaacggcttacagaacgctcccctacccaacaacgcctaagcgtcgctgccgcagcttcggtgcatggtttagccccgttacatcttccgcgcaggccgactcgaccagtgagctattacgctttctttaaatgatggctgcttctaagccaacatcctggctgtctatgccttcccacatcgtttcccacttaaccatgactttgggaccttagctggcggtctgggttgtttccctcttcacgacggacgttagcacccgccgtgtgtctcccgtgataacattcttcggtattcggagtttgcatcggtttggtaagccgggatggccccctagccgaaacagtgctctacccccgaagatgagttcacgaggcgctacctaaatagctttcggggagaaccagctatctcccggtttgattggcctttcacccccagccacaagtcatccgctaatttttcaacattagtcggttcggtcctccagttagtgttacccaaccttcaacctgcccatggctagatcaccgggtttcgggtctataccttgcaactaatcgcccagttaagactcggtttccctacggctcccctatacggttaaccttgctacaaaatataagtcgctgacccattatacaaaaggtacgcagtcacaccacgaaggtgctcccactgcttgtacgtacacggtttcaggttctatttcactcccctcgccggggttcttttcgcctttccctcacggtactggttcactatcggtcagtcaggagtatttagccttggaggatggtccccccatattcagacaggatgtcacgtgtcccgccctactcatcgaactcacgacctgtgcattttagtgtacggggctatcaccctttactgcgcgactttccagacgcttccactaacacacaagccgattcaggttctgggctcctccccgttcgctcgccgctactgggggaatctcggttgatttcttttcctcggggtacttagatgtttcagttcccccggttcgcctcatgccactatgtattcatgacatgatagtgtgtcgaaacacactgggtttccccattcgggtatcgccggttataacggttcatatcaccttaccgacgcttttcgcagattagcacgcccttcatcgcctctgactgcctaggcatccaccgtgtacgcttagtcacttaacctcacaacccgaagatgtttccatcgttcgcgctgcaaacatttgagagactctatgacaggttactcttcatcccaatacatctacggagggacaaatttcagccgtcatgtttcaattttcagcttgttccagattgttaaagagcaatatcttaaacatgactcggaagtcatctttaagatatggtgtatcgtcagatactgaagaccgccgctttcaccgggtgggtcggaagcttggcgtcccctaggggattcgaacccctgttaccgccgtgaaagggcggtgtcctaggcctctagacgaaggggacacgacaccgtacttttatgacgcttttgctcgttactttttcatcagacaatctgtgtgagcacgccacgcgaagcaatatctttaggtgaggaggtgatccaaccgcaggttcccctacggttaccttgttacgacttcaccccagtcatgaatcacaaagtggtaagcgccctcccgaaggttaagctacctacttcttttgcaacccactcccatggtgtgacgggcggtgtgtacaaggcccgggaacgtattcaccgtagcattctgatctacgattactagcgattccgacttcatggagtcgagttgcagactccaatccggactacgacgtactttatgaggtccgcttgctctcgcgaggtcgcttctctttgtatacgccattgtagcacgtgtgtagccctactcgtaagggccatgatgacttgacgtcatccccaccttcctccagtttatcactggcagtctcctttgagttcccggccgaaccgctggcaacaaaggataagggttgcgctcgttgcgggacttaacccaacatttcacaacacgagctgacgacagccatgcagcacctgtctcagagttcccgaaggcaccaatccatctctggaaagttctctggatgtcaagagtaggtaaggttcttcgcgttgcatcgaattaaaccacatgctccaccgcttgtgcgggcccccgtcaattcatttgagttttaaccttgcggccgtactccccaggcggtcgatttaacgcgttagctccggaagccacgcctcaagggcacaacctccaaatcgacatcgtttacagcgtggactaccagggtatctaatcctgtttgctccccacgctttcgcacctgagcgtcagtcttcgtccagggggccgccttcgccaccggtattcctccagatctctacgcatttcaccgctacacctggaattctacccccctctacgagactctagcttgccagtttcaaatgcagttcccaggttgagcccggggatttcacatctgacttaacaaaccgcctgcgtgcgctttacgcccagtaattccgattaacgcttgcaccctccgtattaccgcggctgctggcacggagttagccggtgcttcttctgcgagtaacgtcaattgatgaacgtattaagttcaccaccttcctcctcgctgaaagtgctttacaacccgaaggccttcttcacacacgcggcatggctgcatcaggcttgcgcccattgtgcaatattccccactgctgcctcccgtaggagtctggaccgtgtctcagttccagtgtggctggtcatcctctcagaccagctagggatcgtcgcctaggtgagccattaccccacctactagctaatcccatctgggcacatctgatggcaagaggcccgaaggtccccctctttggtcttgcgacgttatgcggtattagctaccgtttccagtagttatccccctccatcaggcagtttcccagacattactcacccgtccgccgctcgtcacccagggagcaagctcccctgtgctaccgctcgacttgcatgtgttaagcctgccgccagcgttcaatctgagccatgatcaaactcttcaattaaaagcttgatttgcttccactcgagaagcgatgctcaaagatttactgcatgaattttacttcagttagtcactcttcaagacttgatattttttgcatccgaagatgctggatatcgtcttgtggagtgcccacacagattgtctgataaattgttaaagagcagtgagttaggcgctttcgcttgctaactcgaggtggcgtatattacgctttcctctttcagagtcaaccctaattttcaggattttttctctttcttcccggccgctctgtgaagtgaatcacttgcgccgtgtcgatggaggcgcattatagggatccgagttttttgcacaaccccttttttgatcttttctttctgtttgcacacttttcagcccttccgggtggatcttgtgcgatcagggccattttccgcaggatcctgcgcggcgactggttgtaattccatcgccagggtctagtattgccggtaaatatgatcccgacgtgaggcaagcaccatgtccgatgcagtacgttcttatcttcaatacacacccaaactcggtcaacgcgtcttgatcgatccttccagcgtggtgatcggcgacgtcgatctggcggatgacgtcagcatctggccgttggtcgccatccggggcgacgtcaatgcggtaaagatcggcgcgcgcagcaatattcaggacggcagcgtactgcatgtgactcatcgctccgaacataaccccgacggttatcccctgcttattggggaagacgtgaccgttggtcataaagcgatgctgcacggctgcgccatcggcaaccgggtgctggtcgggatgggatcgatcctgttggacggcgtagttgtagaagatgacgtgatgattggcgccggcagtttggtggcgccgggcaagcgcctggcgagcggctatctttatatgggtagcccggcacgccaggttcggcctttgaccgccgccgagttggagggattgctttattcttctaacaactatgtacgctggaaagacgaatacctgtcggaagatatctgatgggcgccccgttccctataaagagaacggggtaggggatttatgccaccagctcgctgcgcagctggcgtaataccggctcgatctccggcatcactccgtgccacagcaggaaagcatgtgccgcctgccccaccagcatacccagcccatcggcgtattccgttgcgccctgctgctgcgcccaggccagaaatggcgtaacgccttgctgatagaacatgtcatagcaacgggtttgcgcattcaccacgcctgcaggcaacgccgggatctccccgctgatgccggacgccgtcgcattgatcaccagatcaaaagcttgctgatccagttgatccatcggcaccgccgagatctcccccagatgccggaaagcgtcggccaactcttgggcccggctgaaagtgcggttggtgatcgtgagccggcagccgaaagacagcagcggcaggatcacgccgcgcgccgcgccgccggcgcccaccagcagaatgcgatcctgcggccggatcaattgctgacgctgcagatcggtcagcaaaccgatgccgtcggtgttgtcccccaatagaccgccattcggcaataccttcagggtgttaaccgcaccagccatcgccgcgcgctcactcagttcagaggctgccgaataagctcgctccttgaaaggcaccgtgacgttcgcccccaaccctccggcgcggataaacgcctgcaggctggtttcaaaaccgtccagcggcgccaacaccgtcccataaggatgctcaatgccggtctgggcagcaaacagcgcatgaattcgcggcgacttgctgtggccgatagggttgccaaataccgcaaacttctccatgcccattacctctagccctgacggatctgttcgccggtcagaacgtctctgatttcggaaggattaagacggccacccaccttgccgcgcaataccgggaaagcttcgccgaactgccgcgtgacctcatccgcactgcggcacggttccagcccactgagattggcgctggtcgataccagcggcttgccgtactgccggcacagcaactgcaccagcggatgatcgctgacgcgcaccgccagtgaactgaaacgcccggtcaacaaacgcggcgtctccggccgagcgggcaacacccaggttaccggcccaggccagctggcaaacatcgtcgcgcgctgctgttcgctgagcgtactgtcgtcaatataaggcttaagctgcgcatagtcggcggcgatcaaaatcagccccttttcccacggccgctgtttcagcgccagcaatgcattgaccgcctgctcgctgtcgggatcgcaacccaggccgaataccgcttcagtgggatacgcaatcacctgctgttgatgcaaagcatcgatgatagataaaagattcgggcttaattctgaattcatgatgtgattattctgtagtcgcgacgggttttccgcacagcttgctggcacagcacaggacggggccttttgccgtgcgcttttccatcagcagcgggtaatggcagtaggcgcattcaccggcgacgggtttaacgttgagggcgaactggcattccgggtaacgatcgcaggaatgaaaaaccttgccgtaacgcgacttgcgctgcaacagcttgccttgcccgcactgcggacaggtaatggcggtttcgtcaggcttgtcgatcacttctgtgtgatcgcattgcggataatcgctgcagccgataaacatgccgtagcgcccctggcgcagcaccaacgtcgcctgacacttcgggcactgttgcccatccaacaccttaacgacatgcccatcggcctgcgctttcagcggccgaatatattggcattcagggtactgggaacagccgaggaaggggccgtggcgaccgctacggatcaccagctcggccccgcattccggacagggttcattttgcctggcggcaaaaatcgcgttttttgtcataacgtcttctatgcgcgttatcggctcaatgcagataaccttcgttcacttcaaacaacagttcttccatttgctgataggcgctttcatatccggggatattaaacagcaccatcaacacgacccatttcagatcttcgagatcgaattccgcattatccaaagccataacgcggtcgataaccatttcacgggtttcgaggttcaatacctgaatctgttccaggaacaggagaaaaccacggcagccggcgtccaaacgcgcgctttcctcttcggtatagatccgcatcgccagcggatcggcatccataaagtaaggcgcgttttgaccttcttgcaggtcggccaacttctcaagccaattcaacgcgttgtagatatcatcctgatgaaaccccgcctgggcgagatcatcggtcagttgatcctgatcgacgcgcatctctggttcattgtggatataagtttcaaacaagtacatgagtacgtcgaacatggcttgccctccttattcggacatagccgccgggtacagctgcgatccaccctgctaactccagttcgagtaacttgattaccaccactggcacaggttggccggcacgttcagcgacgacgtcaacaggtgtcacctcatctcctacgttagccaacacatcggcaaatggcaattcaacttcagcctgcgacgcacaaatagttgtattttcgttcagtggcaaccactgaaggccgcttcccagcaattcggcgatatctttcggcccagtcaccagatgcgcgccctgttggatcagccagtgcgtgccttcgctcatcgggttccctaacggccccggcaaggcgaatacctcacgcccttgctccagcgcatagcgagccgtcaccagggtaccgctgcgcaacgaggcttctatgaccagcaccccctggctcagcccgctgataatgcggttgcggcgcggaaaatggtcggccaggggcaaatcggtgaccaaatgatctgaaatcaccgcaccgccctgctcgactatctgctctgcgagcctgtggtgccgccgcgggtagacattggccagcccgcagcccaacaccgctatcgtgcaacccccggccgccagcgctgcgcgatggcaaatgccgtcgatgccgatcgccaaaccgctggtgatggtgaaaccgcaacgcgccaattcctcggcgaaatggttagcccagcgctcgccgtagtggctgaactgccggctgccaaccatggcaagttgcgggcgcaacagcgcctgaggatctccatcgatcagcaggaacagcggcgcatcgtcgatctgagccaggcattcgggatagccggccgctgcatagttcagcatacggtgcgccggcacttccagccaacgcaaggtggccgccagataaccgggatccgtctggttgaactgtgcccgctgcctttcgttcaatcccagttcacgcagcgcgcgattgggttcgccccccatttgcgataactgctgcacgatccggctggccgtcggggtttgtagccccgtaaccccccgcatccgtaaagcgatctcttccagccgcatcctctgttccctcagcaaaaacggtggtattaccaatctgagcaattggtgcgcaatgctgtcaatcaggtcgggaaatgtctagaatagaggttaaacctcgttcattactcggatacagatctaaagatatatgtcagtcttgcaggtattacatttcccagacgagcgtctgcgcaaagtcgcggcgccggtaaaagaagtcaatgcagatatccagcgcatcgtggatgatatgtttgaaaccatgtacgcagaggaaggcattggcctggctgcgactcaggtggatatccatcagcgcattatcgtgatcgacgtctccgagaatcgcgatcagcgcctggtgctgatcaacccggagctgctggaaaaaagcggcgaaaccggcatcgaggaaggctgtctttccattccagagcagcgtgcgttagtgccgcgcgccgcgcaggtgaagatccgcgcgctggatcgcgaaggcaaacctttcgagctggaagcggacgatctgctggcgatctgcatccagcacgagatggatcacctgatgggcaagctgttcgtcgattacctgtcgccgctcaagcgccagcgtattcgtcagaaactggaaaaaatggccaagctccaagcccgcgcctaaccgatcaggaaatcaacgtgtctgactctttacggattattttcgccggaacaccagacttcgcagcgcgtcatcttgacgcgctgttgtcatctgagcaccagattgtcggcgtatttacccagcccgaccgcccggcaggccgcggcaacaagctgacgccaagcccggtcaaagcgctggctgaacaacaccaactgccggtatttcagcccaaatcgctgcgcccagaagagaaccagcgcctggtggccgatcttaacgccgacgtgatggtggttgttgcctacgggctgatcctgccacaagcggtgctggatatgccgcgcctgggctgcatcaacgtacacggttcgctgctgcctcgctggcgcggcgcggcgccgatccagcgttcactctgggccggcgacagcgaaaccggcgtgaccatcatgcagatggatgtcggcctcgataccggcgacatgatgcacaagatcgcctgcccgattgagagcagcgacaccagcgccagcctctacgacaagctggctcagctcggcccgcagggcatgttgacgacgctgcgccaaatggccgacggcagcgccacccgcgaagtacaggacgaagcgttggtcacttacgccgagaagctgagcaaagaagaagctcgcctggactggaccctgtccgccgcccagttggagcgctgcatccgcgccttcaacccttggccgatcagctacttcaccatcgacgatcaaccggtaaaagtctggcaggccagcgtgctggcgcaaagcgccaacgcggagccgggcaccgttgtccatgccgacaagcaaggcattcaggtggcgaccgccgacggcatcctcaatctgatccagctgcagcccgccggtaagaaaccgatgtcggcgcaggacctgttaaattcacgtcgtgaatggtttaccccgggtaaccggctgtaagtcaccccactgcccggccgttcatcgccgggccgttattttcttaatgccgatcgttatcagcttcagcctatgaaaaataattacaatctccgcagcatcgctgccaaagccatcggccaggtgctggatcaggggcagtcgctcagcactgtcctgccggcgctgcaaacctccatcagcgacaaagatcgcgggttgctgcaggagctgtgtttcggcacgttacgcgtgctgccgcagctcgaatggtgcattcagcaattgatggccaagccgctgaccggtaagcagcgtacgctgcactacttgctgatggtcggcctgtatcagctgctgtatacccgcatcccggcgcacgccgtgctggcagaaaccgtggaaggtgcggtagcgctgaaacgcccgcagttaaaaggcctgattaacggcgtcttgcgccaatttcaacgccagcaggaagagctgttgcaacgcgccgccaacaatgacagccgctatctgcatcccagctggttactgaaacgcattcaacaggcttatcccgccaactgggaacagatcgtcgacgcgaataaccagaagccgccgatgtggctgcgcgtcaaccgcctgcatcacacccgtgacgcttatctgcagctgctgaacgacgccggcatcgccgcggaaactcatgcagactatgccgatgcagtgcgtttgctggcgccttgcgccgtgaccgatctgccagggttcgccgaaggctgggtcaccgtgcaagatgcctcagcccaggggtgtgtcgatctgttggatccgcaagacggcgaacagatcctcgatctgtgcgccgcacccggcggcaaaaccacgcatattttggaagcggcgccgaaagcacacgtcatggcggtcgatatcgacgaacagcgcctggcgcgagtcaaagagaacctgcagcgtctgcgtttgcacgcagaggttaaactgggcgatggccgcactccgcagcagtggtgcggggacaagcagttcgaccgcatcctgctggacgcgccttgttccgccaccggtgtgatccgccgtcatcccgacatcaaatggctgcgccgcgatcgcgacatcgccgaactcgccgcactgcaggcagaaattctggaagccgtctggccgcatctaaaatcaggcggagtgatggtttacgccacctgttctatcctgccggatgaaaacagcaaccagatcgccgcgttcttgcaacgccacgccgatgccaagctggttgaaaccggcgatgcgcagcggccagggcgacagaatatcccgcatcccgaggacggcgatggcttcttttacgctaagctgattaaaatgtaatgcttcagggcgtgcgtgcgcgccctaagtctttcagtgtgaagcagagaacacgatgaaaataattattcttggtgccggtcaggttggcgggacgctggcggaaaacttggtgggtgaaaacaacgatatcaccgtcgtcgataccgattccggccgcttgcgtcagctgcaggataaattcgatttgcgggtggttcaggggcatggttcccaccctcgggtgctgcgcgaagccggcgcagaagacgccgacatgctggtcgccgtcaccaactccgacgaaaccaacatgatcgcctgccagatcgcctattctctgtttaatacccctaaccgtatcgcccgtatccgcgcgccggaatacatccgcgagtcggagaaactgttcctgccggaagcggtgccaatcgaccatctgatttcgccggagcagctggtcatcgactatatctacaagctgattgaataccctggcgcgctgcaggtggtcaactttgccgaaggcaaggtcagcatcgccgcggttaaagcctattacggcggcccgctggtcggcaatgcgctctcttcaatgcgcgagcacatgccgcatatcgatacccgcgtcgccgccatattccgccaggatcgtccgatccgtccgcagggctcgaccatcatcgaagccggcgatgaagtgttcttcgtcgccgcctcacagcatatccgcgcggtgatgagcgaactgcagcggctggaaaaaccctataagcgcatcatgatcgtcggcggcggcaacgtcggcgccggcctggccgccaagctggaaaaagactacaacgtcaaactgatcgagcggaatcagcaacgcgccgccgaactggccgaacagctgcacgacaccattgtattctacggcgatgcctccgatcaggagctgttggccgaagagcacgtcgagcaggtggatgttttcatcgccatcaccaacgacgatgaggccaacatcatgtccgccatgctggccaagcgcatgggcgccaagaaggtgatggtattgatccagcgccgcgcctatgtcgatctggtgcaaggcagcgtgatcgatattgccatttccccgcagcaggcaaccatctccgcgctgcttgggcatgtgcgcaaagcggatatcgtcagcgtctcgtcactgcgccgcggcgtggcagaagcgatcgaagcgattgcccacggcgatgaaagcacatctaaagtggtcggccgcatcgtggaagacatcaagctgccaccgggtaccaccatcggtgcgatcgtgcgtggcgacgacgtgatcatcgccaacggcaacagcaaaatcgaacagggcgatcacgtcatcatgtttattaccgacaagaaattcgtgccggacgttgaacgcttgttccaaccgagcccgttcttcttgtagaacgaatttattaggcgatggtctataattgcgtagttgttctctgccttgggaggagataaaacttctctccatttgtggcaaagggaaattgctttgttaaacttgagttattaattctgcaaggggtgcgttctatgagtatgttgaaagagtttcgcgaatttgccatgcgcggcaacgtggtcgatctggccgtcggtgtgattatcggtgctgcattcggcaagattgtttcgtccttcgtggccgatatcatcatgccaccgttgggcttactgattggcggcgtcgattttaaacagttccatctggtgttacgtgaagctcagggcgccgtaccggcggtggtaatgaactatggttcattcatccagaccgtatttgactttgtgattgtcgccttcgctatcttcctggcgattaaactgatgaacaagatgcgccgcaagcaggaagaagcgccggcagcgccgccagaaccaaccgcagaagagaaactgctgacggaaatccgtgatttgctgagccagcaacagcagccaaagctgtaaaacagcattaagttacgccaataaaaagccaccgatgaaggtggcttttttaatgccttaaaaccagaaagccagtggtaaattatcgtttgatagtttgccactggcctcccagttaccgcctttgttgtgtttttctttacgccgatagctgcctttgcctttcacattcttttccactcgttggcggaatagcgggtcatgcagcagcgcctcaatggcgttatcttgaatctggcctttagtgtgacgatatttcgtcatgataatgctcctgtaaaaggtagggtaataaaacgagccgataatactgccggcaatataaaaattaaagtgtcgtcagcaatcttttttgcctttatcatcgctggcaccctgttccaaggcttccagaatagaacaatagttgctggtatgggcagtgccgcagcaggcgtcactcaggcgtttcaacgattcgcgcatgcgagtcagctccgccaacttgctttccacttcgctcagtcgcgcatcgacgatcgacttcgattcctggcaggtatgatgttcaggatcaacccggatcgacagcagttcggcgatcgtttccagagtaaagcccaactgtttggcatagcgaataaaacgcagccgctgcaggtcctgctccgtatacagccgataaccgccttcggtgcggacattgtgatccatcatgccctgcttttcatagtaacgcacggtatccggcgtcacttcggcgagcttggccaactgacctatcttgaacattaccgctcctctcgggtgaacttgccatcaagcgcgcgctgatattcgccatgcaagaaatcggtgctcatcccagcctgacgcagccggtgctccagcagtgccatgcgcttgctgagatcgacatagtccggatgttcgctattaatctcttgcagcaagcgggcaacggtcaacgcctctttacgatcttccagcgccggcggcaggtaaccggcatttttcagcaaacggtaaccggcgcgtagctcgggcggcaccgcgctgtcatcttccagcgccagcggctgcccctggcctggcaggttgtcgaactcgcctttatcctgagcatcaaggatatgacgctccgcccattgatcaagcaaccccatgacagacagcctcggttagcctaatgaataagccttagcatagcggataggggcggggatcttaagcactgcaggggaattgcgcacatttggctggatttggacgtaaaaaaaccgggcaagcccggtttttttacgcgtctacagattactctgcagttgctacttctgcttgagactcagcacgatcaaccagctcgatgtatgccatcggcgcgttgtcgcctgcgcggaagccacacttcagaatgcgagtgtaaccaccggcacggctcgcgaaacgcgggcccagctcgttaaacagttttgccacgatctcgttatcacgagtacgggcgaatgccagacgacgattagctacgctgtcggtcttggcaagagtaatcagcggctcaacaacgcgacgcagctcttttgcttttggcagggtcgtcttgatgatctcatgacgaaccaaagagccggccatgttacggaacatagcctggcgatggctgctgttacggttcagttgacgaccactcttacgatggcgcatgaccttatccttctcagtaaaaccttaacctgtgatccggttactcgtcagcaatgcttgccggcggccagttttccaggcgcatgcccagagacagaccacgtgaggccagcacgtctttaatctcggtaagagattttttacccaggtttggcgttttcagcaactcaacctcggtacgctgtaccagatcaccgatgtagtggatagcttctgccttgaggcagttagcagagcggacagtcaattccagatcgtcaacagggcgcagcaagatcggatcgaattccggtttctcttctttaacttccggctgacgcacatcacgcaggtcaacgaaagcttcaagttgttcagccagaatggtggccgcacggcggatcgcctcttcaggatcgatcgtgccattggtctccatttcgatgaccagcttatccaagtcagtacgctgttctacacgcgcagcttcaacattgtaggcgatacgctctacagggctgtagcaggcgtcaaccaacagacgaccgattgggcgctcatcttcttccgaatgaattcgggcagaagccggcacataaccgcgaccgcgctgaactttgatacgcatgctgatagccgcgttctcatcagtcaggtggcaaatcacgtgctgaggcttgacgatttcgacatcaccatcatgggtgatgtcggcagcggtcacagggccaatgccagatttattcagggtaagaataacttcgtctttgccttgaactctcaccgccagccctttcaggttgagcaggatctccaggatatcttcctgtacgccttctttggtgctgtactcatgcagtacaccatcaatctcaacctcggtcaccgcgcaacccggcatagatgaaagcagaatacggcgcagtgcgttgccaagagtatggccaaagccacgctctaaaggctcaagggtcaccttggcgtgcgtcgaactgacttgctcgatatctaccaggcgcggttttagaaactctgtcacagaaccctgcattgtgtcctctctttggtactaagctttacttggagtaaagctcgacgatcaggtgttcgttaatgtccgcagacagatcggtacgttcaggcatacgcttgaacacgccttccatcttagcagcatcaacttccagccaagtcggcttttcacgctgctcagccagctccagagaagctttaacacgagactgctttttagctttctcgcggatgctgactacgtcattcggagatacctgataagaagcgatgttaacaacgcgaccgtttaccataactgctttgtggctaaccagctgacgtgactctgcacgagtagcgccgaagcccatacggtaaacaacgttgtccagacgaccttccagcagctgcaacaggttttcaccggtgttgcccttcaggcgggttgcttctttgtaatagttgcggaattgacgctccagaatgccgtacatacgacgaactttctgcttctcacgcaactgaacaccgtaatcagacagacgcggtttacgcgcaccatgctgaccaggtgcttgttcaattttacacttggaatcgatcgcgcgaacgccagacttaaggaacaggtctgtgccctcacgacggctcagcttgagcttaggacccaaatatcttgccattttctttctccaacaatcctaaaagctgcgttacacgcggcgctttttcggcggacgacaaccgttatgagggatcggagtcacatcagtaatgttagtgatgcggaaaccagccgcgttcagagcgcggatagtagactcacgaccaggaccaggtcctttaaccataacttccaggttcttgataccgtattctttcactgcgtcagcacaacgttctgctgcaacctgtgctgcgaacggagtggacttacgagaaccacggaaaccggaaccaccggctgttgcccaacccaaagcattaccctgacgatcagtgatggtaacgatggtgttgttgaaagaagcatggatatgagccacgccgtcagagacttgctttcttacacgcttacgtgtacgaacaggtgcctttgccattattcaataaccccgattatttcttgatcggcttgcgcggacccttacgggtacgagcgttggtcttggtgcgctgaccgcgtaccggcagaccacgacgatgacgcaaaccacgatagcaaccaaggtccataagacgcttgatgctcagggtaatttcacgacgcaaatcaccctcaacggtgtatttggcaactgcatcacgaagcttttcgatttgctcttcagacagctcactgatcttaacattttcagcaatacccgtagatgcacagatagcctgtgaacgggttttaccgataccgaagatcgacgttaaggcgataacggtatgtttatgatcaggaatgttaatgcctgctatacgggccactatgcactcctactattttatacagcaacaccattctgaaaagcccgttttcaggatactcaaataatgttgcagtgcgacatacaaaagattggctggctaatctagccagctcaacccaactttgcaagaaaaatatgcgagataatcagccttgacgctgtttatgcttcggctcggcgctgcaaatcacacgaacgacaccgttacgcttaacgattttgcagttacgacataatttcttgacggaagcacgaactttcatttttactctccgtaacttctcaaacgaatctgactagcggttatagcctttcagatttgctttcttcaatgcagactcgtactgacttgacatcatcagagtttgcacttgagccataaagtccatgatgacgacaaccacgatcagtagcgaggtaccaccaaagtagaatggtactttcattgcatcacgcatgaactccgggatcaggcagatgaaagtaatgtacatcgcgcccaccagggttaaacgcgtcattactttatcgatatacttcgccgtttgctctcccggacgaattcctggtacgaaggcaccggacttcttcaggttatctgctgtctcacgcgggttgaaaaccaacgccgtgtagaagaaacagaagaagatgattgcagacgcatagagtaacacataaagcggttgccctggctgcaaatacagcgaaatcgtagtcagccagttccaaccggtaccgcccccaaaccatgatgcaatcgtggccgggaacagaataatgctggaagcgaaaatcgccgggataacacccgccatgttcactttcaacggtaagtgtgtactctgtgctgcataaacacgacgaccttgttgacgcttcgcatagttaacgacgatacgacgttgaccacgctcgatgaaaacaacgaagaaggttactgcaaacaccaatactgcaaccaacagcagcaggaggaagtgcaggtcgccttgccgcgcttgctcaatagtatgggccactgccggcgggagccccgctacaatacccgcgaagataatgatcgagataccgttgccgataccgcgctcagtaatctgctcacccagccacatcaggaacattgtcccggttaccaggctcacaaccgcagtaaagtagaatgcaaagcctgggtttaacaccaggccctgcataccaggcatattcggcagaccggtagcaataccgatcgactggaatatggccaataccagcgtaccgtagcgggtgtactggctaatcttgcgacggccagcctccccttctttcttgatttccgccaacgctggatgaaccaccgtcagcagctggataatgatcgacgccgagatatacggcatgatccccagagcaaagatagaagcacggctgagggcaccaccagagaacatgttaaacatttcaatgatagtgcctctctgctgctcaagcaatttggcaagcacagtggcatcgataccaggaatcggaatgaaagagccgatgcggaagacaatcagcgcgccgatgacaaacaaaagtctgcgcttcagctcgccgagcccgcctttagcactttgaaaatctaatcctggttgcttagccatctgctacttattcctcaattttaccgccagcagcctcgatagcagcacgagcgcctttggtgacacgcagaccacgcagggttaccggacgagcgacttcgccagaaagtacaactttcgcgaattcgatctggacaccaactacgttagcggctttcagcgcgttcaggtcgataacatcgccttcaaccagagccagttcagacagacgaacttctgccgtgatcatcgctttgcgtgaagtgaagccgaatttcggcagacgacggtacagaggcatctgaccaccttcgaaaccacgacgtacgccaccgccagaacgagacttctgacctttgtgaccacggccgccggttttacccaggccagaaccaataccacgacctacacgcttaggcgcatgcttggcaccttcagccggagacagagtatttaaacgcatctgttactcctcaactttaaccatgtaggaaaccaggttgaccataccgcgaacagcaggagtatcctcgcgctctacggtgtgaccaatacgacgcagacccagaccgagcagagtagctttatgcttcggcagacggccaattgagctgcgagtttgtgtaactttaatagtcttagccatggtcaattaccccagaatgtcggcaacggatttaccacgcttagcagcgaccatttcaggagacttcatattcgccagagcgtcgatagttgcacgaaccacgttgatcgggttggtggaaccataagctttagccaatacgttgtgcaccccagcaacttcgagaacggcgcgcattgcaccgcccgcgatgataccggtaccttcatgagcaggctgcatgaacacgcgagaacccgtgtgagcgcccttaacagggtgctgcagggtgccgctgttcagcgcgacgttcatcatgttgcgacgggctttttccatcgctttctggatcgctgctggaacttcgcgtgctttgccgtagccaaaaccaacgcgaccgttaccatcaccaactacagtcagtgcggtaaagctgaaaatacggccaccttttacggttttagatacgcggtttaccgcgatcagcttttcctgcagttcgccagcttgtttttcgatgtgagccatcttaaacctcttccttagaactgaaggccagcttcacgggcagcatctgccagtgcctggactcgaccatgatattggaaaccggaacggtcaaaggatactttcgcaatccctttttccaacgcgcgctcagccagagctttacctacggctgctgctgcgtctttgttaccggaatacttcagttgctccgcgatagctttttctaaagtagaagcggctaccagtacttcagaaccgtttggagcaatcacctgtgcgtaaatgtgacgcggggtacgatgtaccaccaggcgggttgcacccagctcttggagcttgcggcgtgcgcgggtcgcacgacggatacgagcagatttcttatccatagtgttaccttacttcttcttagcctctttggtacgcacgacttcgtcggcgtaacgaacacccttgcctttgtaaggctcaggacgacggtaagcgcgcagatctgctgctacctggccaattacctgcttatcagcgcctttcagcacgatttcagtttggcttgggcattcagcagtgatacctgccggcagctggtgatcgatagggtgagagaagcccagggccaaattcaccacgttgcctttaacggcagcacgataaccaacacctaccagttgaagcttcttggtgaagccttcggtaacaccaacaaccattgcgttcagcagagcgcgcgtggtacccgcttgggcccatgcgttagcaaaaccttcgcgcggagcgaaagtcagtgcgttagcttcttgcttcacttcaacggcgtcgtggatagtacgagtcaactcgccgtttttacccttaatcgaaataacctgaccgttgagttttacctctacgccggcaggaatgacgacgggtgcttttgcaacacgagacattctttcctcccgaattaagctacgtagcagataatctcgccacccagaccagcctggcgagctgcacgatcggtcataacacctttagaggtagaaacaacagcgatacccaaaccggccataacttttggcagctcatcttttttcttgtagatgcgcagacctggacggctgatacgttgaatgctttctaccacagctttgccctggaagtacttcagtaccagttccagaacaggcttggcgtcgccttcgattttgaaatcttcaataaaaccttcttccttcagcacgttggcaattgccactttcagcttggaggaaggcatggtgaccgcaactttgttcgcggcttgaccgttacggatacgggtcagcatatccgcgatcggatcttgcatgctcatctgtctttactcccgtgattcaattggtaattaccagctagcctttttcaagcctggtacttcaccgcgcatagcggcttcacgaagcttaatacggctcaacccgaatttgcccacataaccatgtggacggccagtttggcggcagcgtttacgctgacgagacgggctggaatcacgcggcagagtttgcagcttgagaacggcattccaacgatcttcatcggatgcgttcacatcagagataatagctttcagttcagcgcgttttgcaaagaacttgtcagctaatttcacgcgcttgacttcgcgtgctttcattgattgcttagccatcagtaaccctgccttacttgcggaacgggaagttaaaagcagccagcagcgcgcggccttcatcatcagatttcgcagtagtggtaatggtaatatccaaaccacgaacgcgatcgactttgtcgtagtcgatttctgggaagatgatttgctcacgcacgcccatgctgtagttgccacggccatcgaatgacttggcggacaggccacggaagtcacggatacgtggaacagcaatggagatcagacgctcaaagaactcccacatgcgttcgccacgcagagttactttacagccgatcggatagccctgacggattttgaagcctgcaacagatttgcgggctttggtgatcaacggtttttgaccggagatggctgccaggtccgctgcggcgttatccagcagtttcttgtcagcaatcgcttcaccaacacccatgttcagggtgatcttctcgacccgagggacttgcatgacagagttgtaatcaaactgagacatcagttgtttgactacctcgtctttgtagtaatcatgcagtttcgccatcgtattactccaaattacttgatagtttcgctgttagacttgaagaaacggacttttttgccgtcttcgaatctaaagcctacacggtcagccttgccggtagccgcgttgaagatagcaatgttagaaacctgaattgcagcttctttctcaacaatgccgcctggttggttcagagccggaaccggcttctggtgtttcttaaccaggttgatgccttcaacaatgaccttgccagcagacaggacattttttactttaccgcgcttacctttgtctttcccggtaatcacgataacttcgtcatcacgacggatcttcgctgccatgttcgctccttagagtacttctggtgccagagagataattttcatgaacttctcattacgcagttcacgagttaccggcccaaaaatacgcgtaccgattggctgctcgctgttattgttcaaaataacgcatgcattgccatcgaagcgaatgacagaaccgtccgggcgacgtacacccttcttggtgcgcaccactaccgccttcagaacatcgcctttcttcaccttaccgcgaggaattgcttccttgatggtaattttgatgatgtcgccgacgcctgcgtagcgacggtgcgagccacctagaaccttgatacacattacgcgacgtgcaccggagttgtcggcgacgttcagcatagtctgttcttggatcattttagtgctccgctaatgtcaactactactttaaagacccaagtaaaaattaggccgttgaaaagccccataaccgagggcgcagcattataacaccgcttacttggtatgggtagaaaaaataaacggctcattttctgagccgtttattaagtgagagccagctactctattacagaatcgctttctctacaacgcgaaccaacgtccaggacttggtcttggacagtgggcggcattcgcggatttccaccacgtcgccggtaccacattcgttgttctcgtcatgtacgtgcagcttggtcgtacgtttgatgaatttcccgtagatcgggtgcttcacagtacgctcgatagcaacaacgatggatttctccattttatcgctaacaacacgaccctgcagggtacggataacttcagtcatttacacacccgccttttgagtcagtaaagtcttaacgcgtgcgacgtcacgacgcacttgtttcaacaggtgagtttgttgcagctggccactggccgcctgcatgcgcaagttgaattgctcacgcagcaggttgagcagctcggcattcagctcttcaacgcttttttcacgcagctcttgtgctttcattacatcaccgtcttagttacaaaggtggttttgatcggcagtttcgctgctgccagtttgaatgcctcgcgggcaacctcttctggcacgccgtccatttcgtacaggaccttaccaggctggatcagggcaacccaatactccacgttacccttacctttacccatacgcacttccagcggcttctcggtgatcggtttgtccgggaatacacggatccagatcttgccttgacgcttaactgcacgagtcattgcacgacgagctgcttcgatttgacgagcagtcagacggccacggccaacagctttcagaccgaaagtgccgaagctaacatccgtaccttgcgccagaccacggttgcggcccttgtgcaccttacggaattttgtacgctttggttgtaacatcagcgactctccttacttgcggcctttacgctgctgctttttaggttgagcagccggttccggttgttcaactgcagccataccacccaggatctcacctttgaagatccataccttaacgccgattacaccataagtggtgtgcgcttcagatgtgttgtagtcgatgtccgcacgcagagtgtgcaatggaacacgaccttcgcggtaccattcggtacgtgcgatttcggcgccgccaagacggccgcttacttcaactttgatacctttagcgccaagacgcattgcgttctgtactgcacgcttcatagcacgacggaacataacgcgacgttccagctgagaagtgatgctgtcagcaaccaatttagcgtcgagttccggtttacggacttcggcgatgttgatctgtgcaggaacgccagcgatgtccgctacgaccttgcgcagtttttcgacgtcttcacctttcttgccgataacgatgcctgggcgagcagtgtgaatggtcacacggatgctcttcgcaggacgctcgataacgatgcgagaaacggaagctttcgacagttccttagtcaggaattgacgaactttaaagtcgctgtccaggttgtcagcgaattctttggtattcgcataccaagtagagttccaaggtttgacaatacccaggcgaataccattaggatgtactttctgacccattgctagtctccagagtctcagcgatcggacacaaccacagtaatgtggctggtgcgcttcaggatgcgatctgcacgaccttttgcacgcggcataatgcgcttcatgcttgggccttcgtctacgaagattttcgtaactttcagatcatcgatgtcagcgccatcgttgtgttctgcgttagcaatggcagactccagcactttcttaaccagaccagcagctttcttgttggtgtaggtcagagtttccagagcttgcgacactttcttaccgcgaatcaggtcagcaacaaggcgaaccttctgagcagaagaacgagcgtggcgatgtttagcgatagtttccatctcttcctcctaccttagcgctttttagcttttttatcagccgcatggccgcgataagtacgagtcggcgcgaattcacccagtttgtgaccgaccatttcatcggaaacgaacactggtacgtgctgacgaccattatggacagcgatggtcaaaccgatcatgttaggaaagatcgttgaacgacgggaccaagtgcgcaaaggcttcttgtcaccgctttccaccgctttctctaccttcttcagcaagtgcaggtcaataaaaggacctttcttgagagaacgtggcatggcttatcctctaattattttttgctacggcgacgtacgatgaacttatcagtacgcttgttgctacgggtcttcttacctttggtctgaacgccccacggagttaccgggtgcttaccaaagttacgaccttcaccaccaccgtgcgggtgatctaccgggttcatcgccgtaccgcgaacggtaggacgaacaccacgccaacgtgcagcacctgctttacccagaacgcgaagcatgtgttcagcgttaccgacttcacccagggtggcgcggcaatcagctggaactttacgcatttcgccggagcgcagacgcagagttacgtaggaaccatcacgagcaacgatctgaacgtaggcgccagcggagcgagccatctggccgcctttacctggtttcatttctacgttgtgaaccgttgaaccaactggaatgttgcgcatcggcagggtgttacccgctttgattgcagcatcaacgccagattgaatctggtcaccagctttcaggcctttcggcgccaggatgtaacggcgttcgccgtctttgtacagaaccagcgcgatgttcgcggaacggttcggatcgtactccagacgctcaaccacagcagggataccgtctttgttgcgcttgaagtcaaccagacgataatgttgcttgtggccaccaccgatatgacgggtggtgatacggccattgttgttacgaccaccgcttttgctcagtttttccagcagcggggcataaggtttacccttgtgcagctcagggttaaccactttaacaacgtggcgacgacccggagatgtaggtttacatttaacaattgccattgttcttactcctccgacttactctgcgccgccgatgaagtccagattctggccttctttcagggtgacgtaagcttttttccagtcgctacgacgaccaacacgctgaccgtgacgcttcactttccctttaactaccagggtgttcacgtctttgacttcgacttcaaacagtttctgcactgcagctttgatttctgctttggtcgcgtctttggcaactttgagaacgatggtgttgcttttttccatcgcagcggatgctttttcagatacgtgcggtgcacgcagcactttcagcaaacgttcttcacggatcatgccagcatctcctcaacttgcttcacagcatcagcagtcataaccactttgtcgaaggcgatcaggctaaccggatcgatacctgctacatcgcgcacgtcaaccttgtacaggttgcgagctgccaggaacagattctcatccagttcaccggtcacgatcagcacgtcttccagagccatatctttcagtttctgtgccagcagcttagttttaggcgcttctacagagaacttctcgacaacgatcagacgatcttgacgtaccagttcggacaggatgcttttcagcgcgccgcggtacatctttttgtttactttctgactgtggtcctgtggcttagcagcaaaggtcacgccgcctgaacgccagatcgggctctttacagaacctgaacgcgcacggccggtgcctttctgacgccatggctttttgccggaaccagttacttcagcacgggtcttctgagcacgagtaccttgacgggcacctgctgcataagcaacaacaacctggtgtaccagcgcttcgttgaaatcacgaccgaaggtagtttcggaaacagtcagcgcgctttgcgcgtctttcaatactaattccattgctatccccttacgccttcacagctggtttaacgatcaggttgccaccggttgcgcccggtacagcacccttaaccagcagcaggttgcgctcagcgtcaacacgtactacgtccaggctttgaacggttacgcgctcatcacccaggtggccagccattttcttgcctttgaacactttgcccggagtctggttctgaccgatagaacccggaacgcggtgagacaaggagttaccgtgggtagcgtcttgggtacggaagttccagcgcttaacagtgccagcaaaacctttacctttagaagtaccggtaacatcgacttttttaacgtcagcgaagatttctacgctaatttcctgacctgcagcgaattcttgaccttcttccaggcggaattcccacagaccacggccagcttcaacgccagctttagcgaaatggcccgcttccggcttggttacacggttagcttttttgctaccagtggtaacctgaacggcacggtaaccgtcggtgtccaggcttttaacctgagtcacgcggttcgcttcaatttcaattacggttactgggatagaaacgccatcttcagtgaagatacgggtcatacccacttttttaccgactaaaccaatcattgtttcaacctctcaatcgctcaatgacctgattaacccaggctgatctgcacgtctacaccggcagccagatccagacgcatcagagcatcaacggttttctcggttggctcaacgatgtcaaccagacgcttgtgagtgcgaatctcgtactgatcgcgcgcgtctttgttgacgtgcggagagatcagaacggtaaagcgctctttgcgagttggcagcgggatcggaccacggacttgcgcaccagtgcgctttgcagtctcgacgatttccgcggttgattgatcgatcagacgatgatcaaacgctttcaggcggatacggattctttggttctgcatgagaccagagctccaattatttataaacgtaaataattactcctcacacccatttcgattgatgggggagtgtaatcgtcaacatataacccccatatcgggagtattgttcgaaaggcaaaaaaggcctgccaatcgactgattcgctaaaatcaggcttaccaagattaggtaagcccgcgcattatacgcaaaatggcccaggaagcaagccgcagttggaaatatgctcaggaaatcgtcatttttgcgtcttcagcgacgatcacgggatgaaggtggcgatcaaggtatgaattatgcttagcgggcagctcccctgccccaccgtaaaaacggtcgccggcaggagaggcgatgacgaacggaaggcaggcttactctttgcgctctaaaatctgggcttgggcatagttttgaatgccgaggcgagcgatcagatccagctcggtttccagccagtcgatatgctcttcttcatcggccagaatgtcgatcatcaaatcacggctgacataatcgtgaatcgagtcggcgtaggcgataccttcgcgcaggttcttggcgcccgccagctccagcgccagatcggaacgcagcatctcttcaatgtcttcgccgatgttcagcttgccgaggtcctgcagattaggtattccttccaggaacaggatgcgctcgatgtagcgatcggcatgtttcatttcgtcgatcgactcgtggtattccttatcgttgaggcgcattaaaccccaattcttgaacatgcgggcgtgcaggaaatattgattgatggcaaccagctcgttgccgagcagcttgttgaggtgagcaatgatctttttatcgcctttcataggtaactcctcctggccagttctaaaagtgtagaacctgtaagccaagagtcaaaaataaccttaccctttgttaggcaacttcatgcattgggatgatagttccgcgttcctccaccataatctgtcttgcctgacgaatgcactttccacaatcggtaccaatcggcacaagttcacgcagctgcttcatggtatgggggttgtgctgacgcaccgcattacggatcgctttgtcagtcaccgcattacacagacatacatacatagagagactcacttcttaaccaatgcattgagtctaaataggaatggtttttatttcaattaagatttatacgaattgcataaaaaaagggcaccgaagtgcccctttttgtgtcgaaaaattattcgcgattaagcgataactttagcaacaacaccagcgcctacagtacggccgccttcacggattgcgaaacgcagaccgtcgtccatcgcgattgggtgaatcagggtaactttcatgttcacgttatcgcctggcattaccatctctacgccttctggcagttcgatggtaccggtcacgtcagtagtacggaagtagaactgtggacggtagcctttgaagaatggcgtgtgacgaccaccttcatctttgctcaggatgtacacttcagattcgaactgggtgtgcggcttgatggagcctggcttagccagtacctgaccacgttcgatttcttcacgtttgataccacgcagcagaacacctacgttctcaccagcacggccttcgtccagcagtttgcggaacatttcaacgccagtacaggtagacttaacggtgtctttgataccaacgatttcaacttcttcgccaactttgatgataccgcgctcaacacgaccggtaacaacggtaccacgaccggagatggagaatacgtcttcgattggcagcaggaacggcttgtcgattgcacgctctggctctgggatgtagctgtccagggcttcggccagttcgatgattttcgcttcccactcagcttcgccttccagcgctttcagcgcggaaccgcggattactggcaggtcgtcgcctgggaagtcgtaagcggacagcagttcgcgaacttccatttctaccagttccagcagctcttcatcatcaaccatgtcgcatttgttcatgaatacgatgatgaaaggaacgccaacctgacgacccagcaggatgtgctcacgagtctgaggcattgggccgtcagtcgcagctactaccaggatcgcgccgtccatctgagcagcaccggtgatcatgtttttcacgtagtcggcgtgccctgggcagtcaacgtgcgcgtagtgacgagtcggggtgtcatactcaacgtgggaggtgttgatggtgataccacgagctttttcttctggcgcgttatcgatctggtcgaaagcacgtgcagaaccgccgtaggttttagccagtacggtggtgatcgctgcagtcagggtagttttaccgtggtcaacgtggccgatagtaccaacgttaacgtgcggttttgtacgttcaaatttttctttagacacggctatattccttactatagcgctctccccttctggagagagcacgggactttggttttaaccctgcggcttatttgccacgggcttcgattacggcctgagcgacgttgttcggtgcatcatcatacttcaggaattccatggtgtatgatgcgcgacctttagtcagagaacgcagctgagttgcgtagccgaacatttcggacaacggtacttcagcgtggatcttaacgccagtcacttcagattcctgaccgcgcagcatgccgcgacgacggctcaagtcaccgataacgtcaccggtgttctcttctggagtctcaacttcaaccttcatgataggctcaagcagaactggtttcgctttcttaaagccttctttaaaggcgatagacgcggccagtttaaacgccagttcagaggagtcaacgtcgtggtaagaaccgaagtgcagacgaatacccatgtctactaccgggtaaccagccaacggaccagacttcagctgctcctggatgcctttatcaacggcagggatgtattcgccaggaattacaccacctttgatgtcgttgatgaactcgtaacctttcgggttagagcccggctccagtgggtacatgtcgatcacaacgtgaccgtactgaccgcgaccaccagactgcttggcgtgcttaccttcaacatcggtaatcttcgcgcgaatcgcttcgcggtaagctacctgaggtttgcccacgttagcttcaacgttgaattcacgcttcatgcggtcaacgatgatgtcgaggtgcagttcacccataccggcgatgatggtctggttagactcttcgtcagtccatacgcggaatgacgggtcttctttagccagacggcccagagccagacccattttttcttggtcagctttggtttttggttcaacggcgatagagattaccggctcagggaattccatacgctccaggatgattggagagtctggatcacacagggtgtccccggtggtcacgtctttcagaccgatcgcagcggcgatgtcgcctgcgcgaacttctttgatctcttcacgcttgttggcgtgcatctgaacgatacggccgaaacgctcgcgcgcagccttaacggagttcagcacggtgtcgccggagttaacaacgccggagtacacgcggaagaaggtcaggttacccacgaacgggtcggtagcgattttgaacgccagcgcagagaacggctcgtcatcacttgcgtgacgctcagccggagtatctttgccatcgtccaggataccgttgatcgcaggaacgtcagttggtgccggcaggtattcgattaccgcatccagcatcgcctgtacgcctttgttcttgaacgcagaaccacaggtaaccaggatgatttcgttgttcagcacgcgctgacgcagagcggatttgatttcttcctcggtcagctcttcgccgcccaggtatttttccatcagctcttcggaagcttccgcagcggactcgatcaggttctggcgccattcttcagccagatccatcatgtcagccggcacgtcttcgtattcgaaggttacgcctgcgtcttcttcgttccagttgatcgccttcatcttcaccaggtcgataacgccggtgaatttgtcttctgcgccgatagccagctgcagaggaacagggttggcgcccagacgagttttgatctggcctacaactttcaggaagttagcgcccatacggtccattttgttaacgaacgcgatacgtggcactttgtatttgttagcctgacgccatacggtttcagactgtggctgaacaccaccaacagcacagtaaaccattaccgcgccatccagcacacgcatggaacgttctacttcgatggtgaagtcaacgtgccctggggtgtcgatgatgtttacgcgatgcggttcgaactgcttggccataccagaccagaaggcagtagtcgctgcagaagtgatggtaataccacgctcctgctcctgttccatccagtccatggtggcagcgccgtcatgaacttcaccgattttgtggtttacaccggtgtagaacagaatacgttcggtagtggtggttttaccggcgtcgatgtgagcactgataccgatgttacggtagcgtgcaatgggtgttgtacgagccatttgattcctctattcctagggcgttcaagttcagttaacccaagcgggccgatttgacgcgcccgcttggttagcatgactacagccggatgattaccagcggtagtgggcgaacgccttgttggcttcggccatacggtgaacgtcttcacgcttcttaacagcagaacctttgttctctgctgcgtcagacagctcgttcgccaggcgcagagccatggatttatcaccgcgtttacgtgcagcatcaacgatccaacgcattgccagagcattacgacgaaccgggcggacttcaactggtacctgataagtagaaccgccaacgcgacgcgacttaacttctacagtcgggcgaacgttgtcgagagcgacttcgaaagcttccaggtgatctttaccagaacgctgagccagggtctccagcgcggtatagacgattgcttctgcagtagattttttaccgtctaccatcaggatatttacaaatttggccagcagctcagatccgaacttaggatctggcaggattttacgttggccgattacgcgacgacgtggcatggaaatactccgttgttaattcaggattgtccaaaactctacgagtttattttgacattaaagttaaaacgtttggccttacttaacggagaaccattaagcctttggcttcttcacgccgtacttggaacgagcttgcttacggtctttaacaccggagcagtcaagtgcaccacggacggtgtggtaacgcacacctggcaagtcttttacacgaccgccacggatcaggattacggagtgttcctgcaggttgtggccttcgccaccgatgtaggaagtcacttcgaaaccgttggtcaaacgcacacggcaaactttacgcagtgcggagtttggttttttcggggtagtggtatatacgcgggtgcatacgccacgtttctgcgggcaggcttccagcgctggaacgttgcttttagcagccttcacagagcgtggtttgcgaaccagctggttaattgttgccattaaaaaagctcctggtttttgcttcgtactagcttcgtaaacatgtgataaatcccctcgtatgcactactggcaaagtacgaggacgcagaattttatggctgaccagtatgggtgtcaagaaatatacaacatcactctcatcaccaggccatttggctgcggtgttgttcggttaattcaacgaagtgattatagccgacgacagtgattttgtgcgaaaaatgaccaaccaatccccgggcttccaggtcgtcctgcagcgcataaagggatatgggggcggcgagcagcaattcaagatgagcgctgccggcaaggcctgccagcacgccgtcctgcagcagcaacagcgcgtcgccctgcgccgtcaggcgcagcagcgcaggcaggtcacattggtttggcgaatggctcagggtatacagcatcagaggatcctaaaacgtcatcacggcgtcgtagccgtccagttcgcggcgcagctcgtccggcgccagcacctcggcgtccagcacccaatcggtcacctggctcagtccgcgttcctgcagtgaagcctggcacagatagcaccgctccacgtcatacagcggcagcacgccaaaggtggcaatgtaattgcgcgccaaaatcttttccggctgttggcccggcaacagctgcaatacgccatcgccgacaaaaaacacccccacatcttcactgagcgccgacatggcgagcagcgcatccagcccttccctgccgctggcgccgccgtgcggcccatgggtgaaaacaaaagcgactcgtttcatcctatcctcagaactgcaccagacggtcgcaacttagcgacgcttcggccagggaacccaacccgctcagggtaaaaccgggctgcaggttggcgcttgccagcccctgctgcgccgcctcctgctcgtcggtgacgccgcggcgcaacgcggcggccacgcagacgttgagcgccacgccgtgttgctgagccagctgcgcccaaccgcgcaccaggtcgaactcatcgctggcgggcgcggtcagctggttggcgttcaacaccccttcacggtagaaaaagacgctggaaagccggtgtcctttcgccagcagggcctgagcgaactgataggcgctgctggcctgctgcgtgccgtaagccggaccggtgaccaacagacaataatcgagcatcaacggtcgcttcccaacagatcgccgctcttgaactggcggatgtacaaatacacggtgtgtttggagatattcaggcgatccgccacctgattgatcgcatccttgatgtcgaagatgcctttctcatagaggtttagcactacctggcggttcttggcgttattggataccgagcgatcggcattcacctcttcgatggtgaactccagcgtctgcgccaccagatcgtcgactgaagacgcgaaattcaccgacgacggcacgtcctgcgtggccggcggcataaaggtctgcatgatctgcgagaacggcacatcgaggttcatgttgatgcacagcaggccgattacccgctgttcgcgattgcgaatggcgatggtcaccgacttcatcagcacgccgctcttggcgcgggtgaagtaggctttcgacacgctgctgtcgtcgccggccatgtcgtgcagcatgcgcagcgccaggtcggtgatcggcgaaccgattttacgcccggtatgttccccgttggcgatgcgcaccgccgaactgttcaggtcttccagcgcgtgcaatacgatctcgcagtggccgccgatcaacatcgccagcccatcgaccaccgcttcataggatttcaggatttcatgatccgtttgagtaaacggacgttcattcagcaaatcaagttcgctggcttcgctggataaaagcgaattcgacatcgaagataccaccctcatagatcgcctgtgccagggggcgcagctaaaaccgctcggaccggatcgctgccgtcgtcggcacgccgcagcgcggctggctgagagcagcataaacggcacgatgacatccgcgggcgaggcggccgggaacaattttaggtacacgccctaaggggcagacgcatgactgataagtcagaattattagtctagcaaagcggccggagcaaagtccttgcgtttgcgcgtggtattgacgttaagcccgatgcccggcaggcgtcaagcgttcaatggagagagaagcggcggcggtcgaaatgaaaaccgccgcggagggcatccgcggcggtggcaaacagagcgacgagattatttcgctttagcgtctgctttcgcgtcagccgatttttcggctttagcgtcggctttcggcgccgctttcacgtccagcagctcaacgtcgaacaccagcgtggagttagccgggatgcccggaacgccggttttgccgtaggccaatgccggcgggatcaccagcttgattttgccgcctttcttgatgtgcttcaggccttcggtccagcccgggatcacgccatccagacggaacgacagcggctcgccgcgggtgtaggagttatcgaactcagtaccgtcggtcagggtgcctttatagtttactaccacggtgtcgctgtctttcggcgcttcacccgcgcccggtttctctacctggtacagcaggccggattcggttttcttcacgcctttttctttcgcgaagctgtcgcggtacttggcgcctttggtttcgttgtccttggcgtcctgttccatcttcgcctgagcggaagccttcacgcgcgcttcgaagccctgaagggtcttctcgatgtcggcgtcgttcagcttgctcttgttggcgaacgcgtcctgaacgccggcgatcagctgatctttgtccagcttgatgcccagcttctcttgctctttcagagagttgtccatgtaacggccgagagaggcgcccagtgcgtaagcggcttgctcgtcgtcgtttttgaacttgccggtgctcggtgctgccgccgcgtccgctggtttagcggcttctgccggtttggcggcatcggctgccatgacctgggtcgcattcagagcaaaagccatggtggttgccagaagcgtgactttaaacaaagatttcatccatttctccagtgtctgaagcaatgccccaaacaatcattaggtaagataaccgggctactatagctgcctgaaacaaaacaaaacagtcgcacaggtaaccaatcgagtcaaagtgtgactcccgctttgccaagaagtttccctctgtgtgctactcgcatgataaatcagatttttcttgcagaatattcggcgaggttagcaaaaaacggcgtatcgggcgtgcaacttttcagcactttacactgccgatcgcaacgttgcgcgccacctggagaaatagcgcgagcaaacccggcatcagctgttaccatagcgccgaatcaggattttatcgcgtcagaggtagcctcatgcacaacgccgacattcaacgcctgctacagcggcttgaagaactggagagccgccaggccttccaagagctcaccatcgaagagctcaaccagaccgtcatccagcatcaaatggaaatgctgaagatgcgcgaacacctgcgcatgttgaccgacaagctgcgctcgacccaaacctcaatgatcgcctcgcaatcggaagaaacccctccgccgcactattgagggcccgctgctcggttatttcaggcgtgccagcccgtcgacggcacgctcgagatagcggcgcgggcaccccaggttgatgcggataaaaccgctcccctgcgggccgaaaccgcagcccatcgacggcgccagcttcgccaccgccaccagcgcctgctgtaagtcagcatcgttcaaacccagtgcacggcaatccagccaggcgagataagtcccttcagcctgggtcatcgtgcaccagggcgcggcggccgccagcgcctgctcaaaccagcgccgattctccgccaggtagtcgagcagctcatcaagccaggcagcgccccgttgataggccgcggtcgccgccgtcatcgacagcgcgttgaatacatccagcccgtgggcgttcagccgatcgacaaacgcctgccgcagccgggcattggggatcaggaaattcgaaatgcgcagcgaagagagtccgaaggttttgctggcggacgtcgccgcaatcacccgctcgcgatattcctcgtccagatgcaacaccgatgtaaacgtctcgccgggcagcagcagatcggcccaaatttcatcggagatcaccgtgacatcgtgggcgtggcagatcgccatgagccgctccagttcctcgcggcgccagcaacggccggtcggattgtgcggattgcacagcaacaacagcggcggtttgcgctgcgccaggcaggcggccagccggtcgaaatcgatccggtatccctgcggggtttccagcagcggattttcaatcacctctctgccgttcatggtgactatcttggcgaacgagccatagtacggcccctgcactaccacgccgtcccccggcttgctgagcagttggatcagcatcgccaaccccggcaccaccccttcaatcgacgtgaaccactcgcgccgcagcggcaagtcgtgccgcttggcaaaccagtcgatcgccgcctggtagtaggcgtcgtcgcgttcgctgtagccaaagacgccgtggtccacccgctgatgcagcgcctgttgcacctccggcgggcatggaaagtcgaaatcggacacccacatcggcaacaattcgctgccgtccagttgcagatagcggtcgatgaagtcccacttcacggagccggtattgtggcgatcgatgatggcgttgaaatgactcgtcatgtcaggcttccttacgctgcaagtcgttctgaggttggagtttggcgataccgaagccggtgaagccataaatcagggcgaacaccactgcgacataacattggatcgcccacggcagcagatcgagcgtgctcactcccagcgtggtcgccatgtaaataccggcggccgtccacgggatcagcggctcgatgacggtgcccgcatcttcgacggtgcgcgacaggtttttgttgtccagccccatgcgtcgataggcccctttgaacagctccgccgggatcagcagcgccagcttgccgtcgctggtcgcgccggtcaccaggatggtggtggcaacggtagcggcgatcagctggccggtggtgtgcaccactttcagcagccggctgatgatcaccgtcagcgcgccggtcagcgtcaaggcgccggcgaaggaaaaggcgcagaacaccagcaggatcgtactcatcatcgagaacatgccgccgcggttcagcaggcgcggcacatcggcgacgatcccttcaacgttatggccctggctggcgaacatcgacagattgaaaccgtccatcaacgcattcagcccctgttgcaggctaaaaccctgcagcgcgacgccgatggcgatcgccagcgcgcaggcggccagcatgacggggatcaccggccgtttggtcaccgcgccccacagcaccagcaccggcggcaggatcaacagcagattgaaatggtacaacccctcaagcgcgctgacgatttcggtcactttttccggcgttgccacgctgcccaccgcgccggtgtggccggcgatcaggtacaccacggcggccaggatgaaactcggcagcgtcgtgtacatcagatgctggatatggctgtagagatcggtatccgcgacgatagccgcgaagttcgtcgaatcggacaacggggaaattttgtcgccgaagtaggcgccggacaccaccgccccggccgcggcggccagcggcacgtccagaccggcggccacgcccatcagcgccacgcccacggtgccggccgccccccacgaggtaccggtgcacaccgagatcacgctggtgatgaagaacgcggcgatcagaatgtattgcgggctaatcagcttcagcccccaatacaccatgtaagggattgtgccgctgatcatccaggtgccgatcagcccgcccacgcagatcaggatcatgatcaccggcattgccttagccagcttggccacgatggccccgatgatgtcatcccagcggtagccttgccaccaggccaacgcggcggcgatggcggcggaagccagcagcagcggttcaatgcgcaggccaaactggccatagccgatgatgagcagcaacagcatggccacaatcggcagcgtcgccagcccaaggttgagcgttttcttattatccatatacggctcctgttgaagagggggtactgcaacagcgtaatggcttcggtaatcggaggatgtgagcgcaggccactggccatgtaatcggtttcatgagatggcgttatgtgagccgcctctcattcgccgcgcttgctttgctcagtcctctcaccatcggcgacggagtctcgcaggataagttcggccgaaaagcggttgttctgcggcgcgacgtcgctgccgctgtggatttgtagcgccagacgcgcggcgcggcgggccattttttcgatggggtaatgcacggtggtcaacgcggggtggagatatttcgccagggcaatgtcgtcaaaaccgacgattgacagcgcttcaggcaactgaacttgccgttggtggcaggtgcgcatcatgccggcggccatcacgtcgttgaacgtcactgcggcggtgaagcgttggtcgctggccagaacgcgctcggccgccagttcgccccctctttcattgaagggcacgctgatgatccagctgccgggcacctcaatgccgccggcggccatggcctggcggtaacccgctaaccgctgcgcgcggtcgtcgatcggcagatccgtcgtcacgcaggcgattctccgatgcccctgacgaatgagcagcttggtcgccgtctgcgccgcattggcgttgtcgagccagatgcaacggttggcgatggcgggcaggtaacggttgatcagcaccagcgcgggcgtgtgggcggcgtagcgcagcagctcctcctcccccatgcgcgtgacgtgcgccacgatggcttcgcatccctgattgatgagaaagtcgaggccgcttttttccagttcggcctgatgcccgccgctgcacaacatcaaacgcacgccggcctgtcgcgtgatgtcttccacgccccgcgccaggcgtgaaaaaaacggatcgtcgaggttgccggtcagcaaccccagcatattgccgcttcttttcgccagcgccagcgcggcggcgttgcggtggtagttaaactcgcgcatcgccttctcgacgcgttcgcgggtcaccggttcaacgtaggcggtattattgatcacccggctgacggtggccgtggaaacgccggcgcgccgcgcaacgtctttcatggtggccatggcatgtcctgttgtgccgttcggcgcccggtgcgccgcgcataaaaaagggcagccgatggccgccctcttgtctcgtgatcgcgttctgcttagtggcagccgcaaccgccgttaccgcaaccgcctttaccgtggtcgtgaccatggtcgtgatcgtggctgtggccgtgaccgccgcagcagccttcaccgtgttcgtggtgatggtcgtgctcgccgtgtacgtgaccgtgtgccagttcttctgcggtcgcttcgcggatcgcgacaacttccacgttgaagttcaggttttggccggccagcatgtggttgccgtcaaccacaacgtggtcgccgtcaacttcggtgatttcaaccggtaccgggccctgatcggtgtcagccaggaaacgcatgccgacctgcagttcgtcaacgcccatgaagacgtctttcggtacgcgctgcaccaggttttcgtcgtagttgccgtacgcgtcgttcgcgccgacgtgaacgtcaaaacgatcgccaacgtcgtggccttcgagcgctttttccagacctgcgatcagagaaccatgcccgtgcagatagtccagcggtgcgctcaccggagactcatcaaccaaaacaccgtcttctgtacgtacttggtaagccaggctgaccaccaagtcttttgctactttcatgatatctcctaccgttggctactaggacgcgcaccgttatcgggatgcgcgccttttccggacagattgtaacggaaatctgcctcgctgtaccctccgggataaaaaaacgctacttcggctgaaaaatgccgatcacctgctcttgcgggcgaacgtgtttttccacctgttgctcggtctggcgctggtgatgaccgcacttgacgcactccaccacttccacctgatcctcccgccacaccgccagcgtatccatggcgctacagcttgggcacaccgccccggcgataaatctcttacgtgttgcagacatcattatgctcccgcttattcgtattcatcccagccgtcaaactggcgactttctttttgcatttcgcgatggaacagctcttccagctcgcgccgcgcctctttcacgcgggaaatttgcgccacgtcgccctgatgcggcggcatcagttcacgcagcatgcgcatatccaggcggcggaaatgctgctgggcgcggaaggcctgatgggggtgcatgcccaactccatcaacgccttgcgccccagttccagcgcgctggagaaggtttcgcggctgaactgtttcacgcccgcctgcagcaactcatgcgcctccacgcggccgcgtgcccgcgccagaatactcagattcgggaagtgctgctggcacagccgcacgatctccatggtgtcttccggctcattgcaggtgatcacgatcgacttggccttttcggcgcccgccgcgcgcaacagctccaactcggtggcgtcgccgtaataaacctgatatccgtaacgccgcagcaccccgacggcgctgacgtcgcgttccagtacggtaatgcgcattttgttggccatcaacaggcggccgatcacctggccgaaacgcccgaagccaacgatgatcacctgaggatcgtcgtcctctacgtacggcgtctcctcgtcttcgcctttggcgttatagcggcgcgccaaaatgcggtcgatggcctgcatgagtaacggtgtggtcatcatcgacagcgtcactaccaccaacagcaaagagagttgatccggctgcagcaccttttgcgcgcccgccgcagaaaacagcacgaaggcaaactcaccgccctggctgagcacgccggcaaactgcaggcgcaccgaactacgcaggccgaacaggcgcgacacgccgtagagcacgccggatttcaccgccaccagcgccagtacgccgatcaacacctcggccagatgggtgtagagcacgccgatattcaacaccatgcccaccgagataaagaacagtcccagcagcagccctttaaacggctcgatggagatctccagttcgtggcggtattcgctctccgccagcagcacgccggcaatgaaggtgccgagcgccatcgacaggccaagcgtctccataaacagcgccgagccgagcaccagcaacagcgccgcggcagtgaagatctcgcgcacgccggaagcggcgatatagcggaacagcggccgcagcaggaagcggccgccgatcagcatgccgccgaacgccgccaccttgagcgcgatcttcgcccagtcgtcgctggtgccgccggcgccggccagaatggggatcaacgccagcgccgggatcaccgccatatcctggaacagcagcaccgagaaacccagctgcccgccttcgttgcgattcatgcccttttcgcgcatcagctgcagcgccatggcggtggaagacatcgccaggccgataccgccgatcaccgccgcctgccaggcgaagtgcgtcaggtacagcaacgcgcccagcaccgccgcggtgatcaacacctggccggcgccggcgccgaagatcgagcgccgcagctcccacagcttgctgggattcagctccaggccgatgatgaacatcaggaacaccacgcccaactcggagaagtgcaggatctcgtcaacgtcgcgaatgaagcccaatccccacgggccgatggcgataccggcgatcagatagcccagcaccgcgccgatccccagacggcgggcgatcggcaccgtcaccaccgcggcgaacaggaacagcaaaatggcggtcagtaaggtcgatccttccatgatcatcgtcctccgtgcggcagcgggtggctcagccagtccccgtaggcgtccgcatggctgcgcagcacctccggcttttgccgccgcgcccaatagaccacgaacggcgtcaaccagtgcatatggcacatcccggcggtcagctcgaacggccgcaggatatcttccatcggatagtggttataaccgccggtacgataggcgccttccggctcgccggtggtgatcaccgagcgccagtacttgcccgccagcgcattgccgcccacgccgctggcgaagccgcgcgccagcacgcgatccagccactccttcagcagcgccgggcagctgtaggtataaagaggatgctgaaacacgatgacctggtgctcacgcagcagctgttgttcgtgatggatatcgataaaaaaatcaggatagtgcgcgtagagatcgtgcacggtgacatgttccaactgctgcgccggtcgaagcaaaacccggttcgccaccgagtcatgagattccggatgggcatacagcagcaagaccttgggcggctgcgacatcattcccctccaaagcgtcgtcagggtagcggttttccgttaccatgcatcgcaaagacaaaaacagcgcgcggtgcgcgttctgttaccttaatgataatttaacatactctgaacatacggcgctttatgattgtattctcctcgctacaaatccgacgcggcatccgcgtcctgctggacaacgccacggcgacggttaatccaggtcagaaggtcggcctggtgggcaaaaacggctgcggcaaatccacgctgttgtcgctgctgaagggcgagatcgcggcggacggcggcagcttcaccttccccggcaactgggcgctggcctgggtcaaccaggagacgccggcgctggacgtgccggcgatcgagtatgttatcgacggcgaccgcgagtttcgccagcttgaagccgagttgcaggcggccaacgatcgcaacgacggccacgccatcgccaccctgcacggcaagctggacgccatcgacgcctggaccatccgttcccgcgccgccagcctgctgcacggcctcggcttctccaacgaacagctgcaaagcccggtgcgcgacttttccggcggctggcgcatgcgcctcaacctggcgcaggcgctggtgtgccgttccgatctgctgctgctcgacgaaccgaccaaccacctggatctcgatgcggtgatctggctggagcgctggctgaaaagctatcccggcacgctggtgctgatctcgcacgaccgcgacttcctcgatccgatcgtcgacaagatcctgcatatcgaacagcagacgatgaacgagtacaccggcaactactcgtcgttcgaacgccagcgcgctaccaagctggcgcagcagcagtcgctgtatcagcaccagcaagagaaagtggcgcacctgcaaagctatatcgaccgtttccgcgcgcaggccaccaaggccaaacaggcgcagagccgcatcaagatgctggagcgcatggagctgatagccccggcgcacgtcgacaacccgttcaccttcagcttccgcccgccggaaagcctgccgaacccgctgctgcgcatggaaaaagtcagcgccgggtatggcgataaagtgatcctgaagtcaatcaagctgaacctggtgcccggctcgcgcattggcctgctcggccgcaacggcgccgggaaatcgacgctgatcaaactgctggccggcaccctggagccgctgagcggcgagatcggcctggcgaaaggcatcaagctgggttacttcgcccagcatcagctggaatttttgcgcgccgacgaatcgccgctgcagcacctgagccgcatcgccccaagggtgctggagcagcagctgcgcgactatctgggcggtttcggcttccagggcgacaaggtcagcgaaatgaccgagcgtttctccggcggcgagaaggcgcggctggtgctggcgctgatcgtctggcagcgcccgaacctgctgctgctcgatgaaccgaccaaccacctggatctcgacatgcgtcaggcgctgaccgaggcgctgatcgatttcgaaggcgcgttggtggtggtatcgcacgaccgtcacctgctgcgctccaccaccgacgatctgtacctggtgcacgatggccaggtcgagcctttcgagggcgatctcgacgattatcagcagtggcttgtcgacctgcagcgccaggaaagccagcaggacgcgccggaaaaagagagcggcggcaacagcgcgcaggcgcgcaaggatcaaaaacgccgcgaggcggagttccgtacgcaaacccaaccgctgcgcaagcagatcgccaagctggaacagcagatggaaaaactgggcgccgaactggcggcggtggaggaacagctggcggatcccgcgctgtacgacatcagccgcaaggccgagttgaccgactgcctgcaaaagcaaagccaagccaaatccgcgctggaagagacggaaatgacctggctggatgcgcaggaacagctggagcagttaacgcaggcgttcgaagcctaagcctcaggccttgtaaaaaggtttatcccccagaatggtcgcgcggtgcatgatgcgccgctgcggcagataatccgcgttggcgtagtgctgcgtcacgcggttatcccagatcgccacgtcattttcctgccagcgccagcgcacctgaaactccggcttagtgatgtgagcgaacaggaaattcagtaaagcatcgctctccttcggctccacatccacgatccgcgtggtgaacccttcattgacgaacagcgcctgtcggccgctgaccgggtgagtgcgcaccaccggatgcagcagcggcggatttttctgcaccgccagttgccaacgctggtgttcttcttcgctaccgcgatgtttgtgctccgggaacgacttggtgaagtcatgctctgcgcgcaaccccgcgagcagcgttctgaacggcgccgacagcgcttcgtaggccgcgatgccgctggcccacagcgtatcgccgccggtggcaggcaaggtcttggccgccaggatcgcgcccagcggcgggttctcgataaaggtcacgtcggtgtgccagttgtcgttgtccggcggattgtcgtcgtgagtatcgagcacgatgatctcttccacgtcggtggcatgcggatagaccggatggatatgcagatcgccgaagcgcccggccagatcgcgctgctgcaacggcgtgatcggctggttgcggaagaacagcacctgatgcttgagcaacgcatgataaagctgttcaaactggccgtcgcccaacggccgggccaattcgacgttttccaccagcgccccgatgtaaggccccagcggggtgatattcagacgttcgttcattgctgtactccatgccacggggtcaatcggcgctgcagggcgcgcagccccagctccaacccaaatgcaatcaccgcaatcacgccgatgccggccaacaccacgtcggtcgccaaaaactcaccggcggattgcaccataaatcccaggccgcgcgtggcggcgatcagttcggcggccaccagcgtcgaccagccgacgcccagcccgatgcgaatgccggtcaggatctccggcagcgcgctcggcaacaccacgaaacgcagcacctgccaacgcgtggcgcccaacgcgcgggcggcgcgcacccgcacctgcgccacgctgcgcacgccggccacggcggagagcgtcaccggcgcgaaaatcgccagataaatcagcaagatcttcgaggtttcgccgatgccgaaccaaatcaccatcagcggcaaatacgccaacggcggcaccggacgatagatctcaatcagcggatcgaggatgccgcgcaccgtgtcgttcaaccccatggcgatgcccaccggaatgccgacgatcaccgccgccagcagcgccaccaaaatgcgccccaggctggccgccagatgctgccatagcgtggcgtccataaagccttgcgggctggcgatggtgatcaactggtgcagcacctgctgcggcgccggcaaaaatagcgggctgatcagctgcagcgccgtcacgccccaccagacgaccaacaccgtcaacagcgtggcgccgctcaaccaaacgttgcgcggcacgctgaaacggcgcgtcgctttgccctgcggctgggctgcggccttcatagtggaatgcaggctcatagcaaggcctcgcgctgttggaaaactttgcccagcacgtattcgcgctgcgcgataaattcaggatcggacttgatggcgcggcaggcttcgccgtcggcatagcgctggccgaagttcagcgacagccgctccaccacctgccccggccccggcgacagcagtaacagttcactggcgaggaacaccgcctcttcgatatcgtgggtgatcagcagcacctgtttgccggtatctcgccagatggtcaacaacaactcctgcatctgctcgcgcgtgaacgcgtccagcgcgccgaacggctcatccagcaacagcagacgcggatcggcggccagggcgcgggcaatgccgacgcgttggcgcatgccgccggaaagctgccagatgaaatgccgctcgtaaccggccagccccacgcgctgcagcatctgctccgccacctggcggcgctgcgccttgccgacgccggccagctgcaggccgaactcaacgttgtccaccacgttacgccacggcagtaagccctcatgctggaacaccacgccccgttcggcgcccgggccgtgaacgggcgttccatccagcgtgatgctgccagctgaaggctcgataaacccggcgatcaaattcagcagcgtggtcttgccgcagcccgatgggccgagcaccaccaccagttgcccggcggcgatctggaacgacacgtcacgcagcgcgggccgcccctgatactctgctgaaagatgattgacgtttagcatcctgcttccttacgactgcggcgcagcctgcacctgtttcacaaaacggtcggtgacgtaagcgctgtagtcgctgtcgacctgcgggatcttgccctgctgcttgaggaattcggcggtatcgcggattgccttgtccaccggctggccgagttgggctacctgatcggccaccggcagatatcggttccccttcaccagttccggcacctgcgcttccggcacgccgctcaggcgcgccagcgtgctgagatggctcggatctttcagccactgttccggtgccgccaggtaggccttttgcgcctgcagggcgctggcggcaaaggcggttactacgtcgggatgtttctctgcgaagtctttgcgcaccacccacacgtccagcgtcggcgagccccattcgcccacctgcgcggagtcggtcagcaccttgccctgtttggccagttcgttgaccaccggcgcccagacgtaagcgccgtcgatgtcgccgcgctgccaggcggcggcgatggccggcggctgcagattgaggatcttcacctgttcaggcttgatgccccaatgtttgagcgaagccagcaggctgtaatgggtggtggaaataaacggcaccgcaatgcgcttgccgatcagatcctgcgggcttttgatgtcattcttcaccaccagcgcttcggaactgccgagctgcgaggcgatgaggaacacttcgatggggagtttctggctggcggccaccgccagtgggctggagccgatattgccgatctgcacatcgccggaggccagcgcgcgcagcacgctggagccgctgtcgaacttacgccagtcgacggtcgcgccggactgtttggcgaagctgttttccgcctgcgccaccttggccggctccgccgacgtctggtacgccacggtcacgtccaccgcgtaggcgctggccgcgctgagcgacaacgccagcagcgccgcgttgcgtaaagaaaagagtttgcccgccatgttccgctccgttgataaaaatctgttcagttgctgacagttttatctgagcgatgacgggcgataaaagaataaaaaagtcttctttattaccctaggtaatattaaaacggatcacagcgcgatcgtcccgtgcaagaacacgtgagcgtagccgcccagcagcgtgcggtccccttgcagttcgcagaacagctcgccgccgcgcgccgaaatctgccgggcgtgcagccgatggcggccgagacgcgccgtccagtagggcatcaacgtgcaatgcgcggagccggtcaccggatcctcgccgccgtcgagcgtgaaatagcgcgaaacgaagtccacggtgtcacccggcgcggtgacgatcactgcgcggccggccaatgcgatcagcgccgggatgtccggccgcagcgcgcgcacctgcgcctcgttttcaagcaccaccagcagcgctttcgcctgccacacttcctgtggctgcacgcccagcagcgccgcgaggcctgccggttcggcgactttctgcggcggcctggcggggaaatcaagcaccagccgctccccgtcccgctcatcgcgcttgacgaacagctcgccgccggccgatctgaagcgaatatccttcagcgccgggttaaccgcgctgaacatcacatgcgccgccgccagcgtgccgtggccgcaaagatcgacctcgcgttccggggtaaaccagcggatggcggtcatgtcgccgtcatcccagacaaagctggtttccgacaggccgatctcgttagcgatcgcctgcagccgctccgccggcagcggctgcgtcagcaggcagaccccggccgggttgccgcgcaacccttcgccggtaaaggcgaccacgtgataatagttttccgccatcgttcactccttaatgccagatcagtaacacacaggctgcagtcaacaaccccatggaaacgttgaagataacccaggcctttttactgcgcagcaggcgaccgatcagggtgccgaacgccagccagataatgccggcgacgatgttcaccaccacaatgcccagcgcgatcgccgcaatggaaccgttgtacttatcgcccgccaggctgaagctcgccaccgcccccagcgccatcagccaggctttcgggttgaggaactgcagcagccagccctgatacagccgcaccggctgcggcggcgccacgtcggtttccagcttttcataggcggcggtggcgactttccacgccagccacagcaggtacaggctgccgaggattttcaggatcaggtgcagcgacgggtagaccaggatcaggctgccgacgccgaacgccaccagcagcaagatgctttgcatgccgagcatgatgccgaccatcagccacagcgatcgcataaagccgaagttagcgccggaggtggtcagcagcagattattggggccaggcgtgatggcggcgacccacaggaagcccagcatcgaaaggaataaactcggttccatggcacgggtgctcctcacccaaggcgcttttttgcagtatcattgataattcttggtattgaagctaacagtgcgctagggatctcacaatagccgcccacaacattttactcagcctatgcctaacacctttcgccctctgacaggggccagtaacccgcacctgcaaacgctgttgccgcggctggtgcgccgccgcgtgttattgaaaccgcattggcaacggctggaattgcccgacggcgatttcgtcgatctcgcctggagcgaggatccggcgcaggcgcgcgacaaaccgcgtgcagtgctgtttcatggcctggaaggcagcttctacagcccctacgcgcacggcctgctcaacgcctggcgcgagcgcggctggctcggggtggtgatgcactttcgcggctgcagcggcgtgcccaaccgcaagcagcgtatctaccactccggtgaaaccgaagacgcgcgcttctttctgcgctggctgcgcgatagctacggcgaggtgccgaccgcggcggtaggcgtttcgctcggcggcaacatgctggcctgctatttggcgcaacaaggcgccgacagcctgctgcaggcggcggtggtggtctcggcgccgctgatgctggaaccctgcgcctaccgcatggagcaaggcttctcccgcgtttatcagcgctacctgctggggcagctgaaacaaaacgccacccgcaagctgttgcactacccggacactctgccgctcaaactgtcacagctgaacgggttgcgacgcatccgcgaattcgacgacgccatcacctcgcgcattcacggcttcagcgacgccaccgactattatcgccgctgcagcgccctgccgctgttgccgtctatccagacgccgctgctgatcatccatgcgaaggacgaccctttcatgacccctgaggtgatccccgacgtcgccggcctgccgcgcaatatcgaatatcagctgactgagttcggcggccacgtcggcttcgtcggcggcacgctgaaaaaaccacacatgtggctggagcatcgcattccggcctggctttccccttatctggacattccgacgtgattattccctggcaagaactggcaaccgacaccctgaacagcctgatcgaatcctttgtgctgcgcgaaggcaccgattacggcgaacacgaacgctcgctggagcagaaggtggaggacgtgcgccgccagctgaaaaacggcgaagtggtgctggtgtggtcggaactgcatgagagcgtcaacatcatgccgcgcggccaattccgcgccgggcaggaagaaatttagtggcgcccggttctatgactgacggaaaaaatcaggtaacaatgggacattgcaaaccagcgcgcgccattttttcctgacatagagagcgtcaacaagagccacaataatcccctgacgccggcgcattcaacacggagtgacaaccatcatgtctgccaaacatcccgttatcgcggtgaccggttccagcggcgccggcaccaccaccaccagcgtggcgttccgtaaaatcttccagcagctcaatatccgcgccgccgaactggagggcgacagcttccaccgctatacccggccggaaatggacgcggcgatccgcaaggcgcgcgatctgggcagacacatcagctatttcggccccgaggccaacgacttcggcctgctgcagcagagctttatcgactacggcaaaaacggcaccggccgttcgcgcaagtacctgcacacctacgacgaagcggtgccctacaatcaggtaccgggcaccttcaccccgtgggagccgctgccggcgccgaccgacgtgctgttctacgaggggctgcacggcggcgtggttactgagcaccatgacgtggccaaacacgtcgatctgctggtcggcgtggtgccgatcgtcaacctggagtggatccagaagctgatccgcgataccggcgaacgcggccactcccgcgaagcggtgatggattcggtggtgcgctcgatggaagactacatcaactacattacgccgcagttctcgcgcacccacatcaacttccagcgcgtgccgacggtggacacctccaacccgttcgccgccaaggccattccctcactggatgaaagcttcgtggtgatccacttccgcggcctggaccagatcgacttcccctacttgctggcgatgctgcagggatcgtttatctcgcacatcaatacgttagtggtgccgggcggcaaaatggggctggcgatggagctgattatggcgccgctggtgcaacggttgctggaaggcaagaagatcgaataaatgcgttgagcgcggcgccggccgcgctccgcctcgattacgccggttggcggatctcgaagctgtgggttaccgtggcggccttgttgagcatcagcgccaccgagcagtatttctccgccgacaggttcaccgcacgttcgacgatcttgtcggtcagatcctggccggtcacgatgaagtgcaggttgatatgggtgaacaaccgcggggcttcttcgcggcgctcggaggtcagcttcacctcgcagtcgcgcacgtcgttgcgccccttttgcaagatggataccacgtcgatcgcgctgcagccgcccaccgacatcagcaccatctccatcgggctgggcgctttatcaccggcgttgccgtccatcagcacctggtggccggaggccgattcacccaaaaacgttaacccttccacccacttaactcttgcctgcattctggtcactccggttgatttcttaaaatcagagtacgctttcgcatagaaacaggcaacgtaacctgatgctaatcatgctgaagcgagacaacacgagacacccgccttactctgtgctacaaacagagccgcaataaatctttccgggacactgaatttcagggaaacgcccagagaaaggctcctttaccggtatgttaacagaatgtagcttgcagcgcttacggcaagttaatatgctagagcgacagcgtatttttatgacacgcctcaaaacttgccggtagccctcgctcataactgcggctacaggcgggttttacagggaactctgacccctgtgacacaaggcagcgataacaacagaggataacagcgaatggttctcggcaaaccgcaaacagaccctactctcgaatggttcctgtctcattgccatatccacaaatatccatcgaagagtacgctgattcaccaaggtgaaaaggccgaaacgctttactacatcgtgaaaggctccgtcgcggtgctgatcaaggatgaagaaggtaaagagatgatcctgtcctacctcaaccagggggatttcatcggcgagctcggattgttcgaagaaggccaggagcgcagcgcctgggttcgcgcgaaaaccgcctgtgaagtggccgaaatttcctacaagaaattccgccagctgatccaggtgaacccggacatcctgatgcgtctgtccgcccaaatggcgagccgcctgcaggtcacctccgaaaaagtgggcaacctcgccttcctggacgtgaccggccgcatcgcgcaaaccctgctgaatctggcgaagcaacctgacgccatgactcacccggacggcatgcagatcaagatcacccgtcaggagatcggccagatcgtcggctgctcgcgtgaaaccgttggccgtattctgaaaatgctggaagatcaaaacctgatttccgcccacggcaaaaccattgtcgtctacggcacccgttaatccccgaagaaacggcgcagtctgcgccgtttttttatctgctccctgccatgtggcgccgcctgatctaccacccggaaatcaactacgcactgcgacaaacgctggtgttgtgcctgccggtgctgttcggcttgttgataggccagctgcagctcggcctgatgttctctctggtgcccgcctgctgcaatatcgccggtctggacacgccgcataagcgcttctttaaacggctgatcgtcggcggcttgctgttcgccttcagcagcgtgctgctgcaacaggcactgctgtggcacgtgccgctgccggcgctgatgctgggcctggcgctgctgctcggcgtcaccggcgaaatcagcccgctgcacgcccggctgttgccggcggcgctggtggccgccattttcgccctcagcacggccggcacggtacccctctggcaggcgccgctgttgtacgtcatcggcaccgtctggtacggcttattcacctggttctggttcaagctgtggaaagaacagccaatgcgcgagacgctcagccagctctacctggagctggcggactatttcgaagccaaatactcgttgctgacccagcacaccgatccgcaaaccgcgctgccgccgctgctggtacgccaacaaaaggtgatggatttgatcagccttttataccaacagctcaatttcctgccgcacgccaacaacctcgaacaaaagcgcctgcagcgcgcctttcaggtggcgatggatctgcaggagcacatcaccgtcagcctgcatctgccggaggaggtgcaaaaactggtggagcagagccaggccgaagcgatcattcgccgcaacgctcaggtgatcgccggccggctgcgcgtggtggcgcacgatattctctaccatcaacattcgaagcgcttctccatgagccacgaactggcggcgctggaaaaaatggcggcgcagcatcccgataacccggtcggccagttttgttattaccacttcagccgcatcgctcgcctgctgcgcacccagcatccgctgtaccgccgcgacctgatgcccggccagcaccgcctgccgttttggccggcgctggccagctacctgtcgttcaaatccaccgccctgcgcaacgccgcgcggctgggggtgacgctggcggtcggcagcagcctgggtgcggttttcaacctgccgaagccttactggatcctgctcaccatcatgctggtgagccaaaacgggtataacgccacccgggtgcgtattcagcaccgtgcgctgggcacgattgccgggctattgctggcggccgggctgttgcagctgcagctgccggaaggagaaacgctgagcatcatgctggtgatcacgctgctggcctacctggtttcgcgcaagaactacgggctgtcggtgattggctttacggtcacggcggtttacaccctgcagctgctggcgctgaacggctcgcattttctggtgccgcgtctgatcgatacgctgataggctgcgtgctggcgttcggcggcaccatttggctgtggccgcagtggcaaagcgggctgctgcgcaagaatgcccatcaggcgctggagaacgatcaagccgcgctgcggcttatgctgaagcagccggaaccggatgccaccgcgttggcctatacccgcatgcaggtcaaccaggcgcacaatgcgctgttcacctcgctcaatcaggcgatgcaggagccggggttcgcgtcgaattatctggcggacatgcggctgtgggtcacgcacagccagttcatcgtcgaacacctgaacgccatgaccattctggcgcgcgagcactacatgctgacgccgaaactggcggaagcctatctgcaaacctgtgaaattgcgctgcaaagctgccagcagcggttggaatacgacggcccgagcagtgacaacagcggcatcatgcagccgccggatctgcatccggacatgcccgtcaccgagatggaacgtcatttgcggcgcattttgtcgcacctgagcgtgatgcataccatttcgtcgctggcctggcgccagcgcccgcaccacggcatctggctcaagcgcaaactgcgcgatcaataagggcgcggcatgccgcgccccgttattcgccgcacgggcttcaggcgttgatcacatcctgcaccgccagctcgaacagcgccatgccggcctcgatgtcctgcagctccaccaccagcgacggcgcgaaacggatcacgttcggcccggcattgaggatcatcagcccacgcgcggcggcggcggtgaggaaatcgcgcgctctgccgtgataatgcggcgtcagttcggcgccgatcagtaaccccatgccgcgaatggcggtgaaaataccgtatttatcgccgatattctgcaaatcctgcacatacagcgcgtggcgctgttcgatgccgctcagcacttccggcgtattgatcacatccaacgccgcctccgccaccgcgcaagccagcgggttgccgccgtaggtggtgccgtgggtgcccacctgcatcaccgacgcaatctcttcggtggtcagcatggcgctcaccgggaaaccgccgcccagcgccttggcggtggtgagaatgtccggcgtcacgccataatgcatataggcgaacagcttgccgctgcgccccatgccgctttgcacttcgtcgaacaccagcagcgcctgatgttggtcgcacagctcgcgcacgcctttgaggaagccggcgtcgaccggcgtaatgccgccctcgccctgaatcggctccatcaccaccgcgcaggtgtggtcgtccatcaccgctttcaccgccgccagatcgttgaacggcacgtgcacgatgtcggccggctttggcccgaacccgtcggagtatttggcctgcccgcccaccgacacggtgaacagcgtgcggccgtggaacgcgttatagaaagcgatgattttggttttataggggctgtggcgggtgatggcgtaatgacgcgccagtttgaacgccgcttcgttggcctctgcgccggagttggcgaagaacacccgatcggcgaaggtggcgtcgatcagtttgctcgccaggcgcagcgccggttcattggtaaagacgttgctggtatgccacagagtctcaccctgacgtttgagcgcctcgaccagcgccggatggcagtgccccagcgccgttaccgcgatgccgccggaaaaatcgatgtactcttttccctgctgatcccagacccggctgccttggccgcgcaccggcacaaactgggcgggtgcataaacaggcaggataacctggtcaaaggtgctgcggctcactgcggattttccagtcattttttcggctccaccctgaaggtttttcagcgctatcgtaatgttagattgaaaacataatcacgaaatatgcataaaaaaccaatcaagcgcaaacgcaaaacgcccgacgagcgaaaaaaacgcatcgggattaacggttgaggaagttatccagcagctgatggccctgctcgctgagcacgctttccggatggaactgcacgccttccaacgccaaagcgcggtggcggatgcccatgatctcgtcgcgcacgccgtcgcgttcgctccaggcggtcacttcaaagcagtccggtagcgtatcggctttcagcaccagcgagtggtaacgtgtcacggtcagcggatcgctcaggccacggaacacgccgacgcccagatggcgaatggccgacgttttgccgtgcatcaccgcgcgggcgcgcaccacctcggcgccgaacgcctgccccagcgcctggtgccccaggcacacgccaaggatcggcagtttgccggcgaaatgacgaatggcggccagcgagatacccgcttcgttcggggtgcaggggccgggggaaatcaccagatgctgcggcgccagccgctcgatatcggccagctgcagctcatcgttgcgcttcaccaccacctcggcgcccaactcgcagaagtactggtaaaggttataggtaaaggagtcgtagttatcgatcagcagcagcatgtcaggtccggcagagaaaaacgccgccatagtttactgatttaacccgccgctgccgacgataatttccgcttactttttacggccgccggtgatcgagcccagcacgccgcgcaggatctggcggccgagatcgcgcgccatgctcttggcggcggtctggacgatgccgtcgcgtttgccgccgcgcgggccggtggaaccgaacaacagctcgttcaaaccatccatcaggccgccgcccgcctgctgttgttgctgttgcgtctgcggttgttgcccctgctgcggggtgccgatggtggcgaaaccgcccgacgacagcttctcgtaggcggactcgcggtcaatcatgtcttcatagcggccatacagcggcgacttgttgatcgcgctgttcagcccttccgcgccaagcatgcccattttggattccggcgcgatgaccatcgcccgctccaccacgttcggccggcccttctcgtcgaggaatgacaccagcgcttcgcccacgcccagctcggtgatcgccgtttcggcatcgaaggccgggttggcgcgcagggtttgcgccgccgtcttcaccgccttctgatcgcgcggggtaaaggcgcgcagcgcatgctgcacgcggttgcccaactggcccagcacgctgtccgggatgtccagcgggttctgggtgacgaagtaaatgccgacgcctttggagcggatcagacgcaccacctgttcaatcttggtcagcagcgccgccggcgcatcgttgaacagcaggtgcgcctcatcgaagaagaacaccagcttcggctgttcagggtcgcccacttccggcaggtgctcaaacagctcggccagcagccacagcaggaacaccgaatacagcttcggctgattgatcagcttgtccgccgccagcagattgatcacgccgtggccgttggcgtcggttttcatcagatcgttgatgtccagcatcggctcgccgaagaactggttggccccctgctcttccagcgtcagcaatccacgctggatggcgccgatagaggcggcagagatattgccgtactgggtttggaattgtttggcgttgtcgccgacgaactgcaccatggcgcgcaggtctttcatgtccagcagcagcagcgcattgtcatcggcgattttgaacaccagctgcagcacgccgctttgcacctcgttcaaatccaacaggcgccccagcagcaacggcccgagatcggaaatggtggcgcggatcgggtggcctttttcaccgtaaatatcccacgggataatggtgcaggcctgcggttgccagtcggtgacgccaatcgccgccaggcgcgcctgcagtttttcggaaggcacgccctcggcgccgatgccggacagatcgcccttcacgtccgagaggaacaccggcacgccgatgcgtgagaactgttcggccattttctgcagcgtcaccgtcttgccggtgccggttgccccggtgatcaagccgtggcggttggccaacgccggcaaaatcaccagatcctgttccggttttccgtctttcatcgctttggcgataatccgtggttcactcattttctgttcctttgacgctgaccgcggcgcgaaacgcgcctgttgatgcaataaagctataagcgccgcgtaaccccgtcaaggacaaacaaaaagggcaccgtcggggcctgatgaattcagattgcgcttagcgtcagagcgtctttgcttgaacaataaagcaccagtgttatagtgagcattacgctgtatatacgaggtaaataccatgtctgaatctaccgtggtaatccgcgtggatgacgagttaaaaaccgctttcgccagcgcggcaaaggccgccgatcgcacggcttcgcaactgctgcgcgatttcatgcgcgagtttgtcagccgccaggcgcagcaggaagagtacgaccagtggttaaaggaaaaggccgaggtgagccgcaaggcgttgcgtgaaggcaagttcgccgacgatgaagaggtggctgcttatttcgccgaacgcagagctaaatcaacgcaataaaacacaaaaggacttttgtgaaactgacatggacggtacccgccatcgccgatcgtctggcgatttatgaatggttggaacttaaaaatccggccgccgccgcagaaaatgatgcaaaaatcgctgacgcggcggcacgcctcgtgcatcatcccaccagcgggaaaacgggtcggatagccggcacgcgcgagctggtcatctccccgtcctatctgttggtctatgaattggcggctcaacgcgtcatcatattggccatcgtgcatactcgccgccggtggccgccggcatagtcacccccgcagccccagttgctccttcagcgccttcaaatagcgccggctgaccggcaccggatcgcctgccgacatgatcatctctgccgcaccgccctcttcgaagcggatctcgcgcacctgctccaggttgaccagatactgccgatggcagcgcaccagcggcgtacggctttccagcgtgcgcagcgtcaattcggtgaaacactccatgccgtcgctgcgcaccacgaataccccgctcagcttggaacggatcgccagcacttcatcgaaccgcagcagatagatgcggctgtggccggtgcagggaatgtatttcaggtagccggcgctctcatccagcgccgtcacgtcttgcggcgcactgcgctgccgcaggcgttgcagcgtcttgctcaaccgcgtcggctccgccggcttcagcagatagtcgaaggcgtgctcctcaaatgcctgcaccgcgtattcgtcgtaggcggtcagaaacacgatgtgcggcatacggttgggatccagcatgccgaccatttccagcccgctgatgcgtggcatctggatatcgagaaacaccacgtccggctgcagccgatggatctggctgatggcttcgatggcgttggcgcactcgccgataatcgagatccccgcttcagcttccagcaggtggcgcaggttgtcgcgcgcggaaggttcatcgtcaacaatcagtgcgtttaacatcaggctgccctctccatagggacattaagcgtaatgcgggtgtaggcgtccggccggcaatccacctgcacgccatagccttcgccgtagcgcacgcgaatgcgtttatccaccaggttcatccccagcccgctgcagttcggtttcggctggaacagcccggcgttgtccgtcacctgcagcagcagatgctcgccttcgcagcaggcgccgatttcgatgcggcctacgcccaacagatgcgaggtgccgtgcttgatggcattctcgacgatcggctgcagcgaaaacgccggcagccgcgccgccagcagcgcctcgggcagcgataccgcaatctccagccgatcggcgaagcgcgctttctctatctgcaggtaggcgttcacatgttcaatttcgtccgccaggctgacttcgtcatccgagcgcttgaggtttttacgaaagaaggtcgagagggactgcaccagatcgcaggcgcgctcgccatcgcgacggatcaccgccaccagggtattcaaggcattgaacaggaaatgcggattgacctgcgcatgcagcagcttgatctccgactgcgccagcagctgcttgtggcgctcgtactgtccggccatgatctgcgccgacagcaggctggcgatgccttcgcccagcgtacggttgatggtgctgaacagctggcttttcggttcatacagcttgatggtgccgatgacccgctggttttcgccgcgcagcgggatcaccagcgtcgatcccagcttgcaggccggattgatcgagcagcagtaagagagctgattgccgtcggcatagaccacctcgttgttgtcgatggcgcggtgcgaatgcaccgaggcgatcggcgtgcccggcaggtggtgatcgtcaccgatgccgataaacgccaacagcttgtcgcgatcggtgatcgccaccgcgccgatgcccagctcctgataaatcacccgggcgaccttcatgctgttttcctgatcgaagccctgccgcaggatgccctcggtgcgctcggcgattttcagcgccttggaagagaaagcgctggtgtatttctcgaacatggcgcgcctgtccagcaggatttgcataaacatcgccgcgccgacggtattggcgatcatcatcggcagcgcgatgtgttccaccagctgcaacgcctcgttataagggcgcgccaccgccagaatgatcgccatctgcagcacttccgccaccagcgccacgccgccgacgaacagcggattgaacagcagctcgatgcgcccccggcgcatggcgatgctgtgtacgatgccgccgaccagcccttcggacaccgtggagatcgcgcaggccacgtcggtcatgccgccgagcgtataccggtgcaggccgccggtcagcccgaccagaaagcccaccgacggcccgcccagcagcccgcccagaaccgcgcctatcgctcgggtgttggcgatcgaatcctgaatatgcagcccgaaataggtgcccatgatgcagaacaccgagaagatcacgtagcacagcagcttgtgcggcaagcgaatggtcacctgcatcagcggaatgaacagcggggttttgctcagcagataggcgataacgagatagacgcacatctgctgcaacagcaacagcacctggttaaattcatacatggcagcaactcatccagagacaacaaagggcgaacgccggatttccggtctggttattgtctgccgattagagcatggggcgcgggagaaaacagtgatgaaggcaaggcttcgggaggaaggacggccgaccccggcgggatcggccaaaaaatttacggcagcaccttggccgacagaatcaccaccggcttggtcggcacattctggtaagggccgacgttgccggtcggcacctgagcgatcttgtccaccacatccatgcctttcaccactttgccgaacaccgcgtagccgaagtcgcgctggccgtgatccaggaaggcgttatccgccacgttcaggaagaactggctggtggcgctgtccttgtcggcggtgcgcgccatcgagatggtgccgcgcaggttgcgcaggccgttgtcggcttcgttcttgatcggcgccttggtggatttttgctgcatgtcagcggtgaaaccgccgccctggatcatgaagcccgggatcacacggtggaaaatggtgttgttgtagtacccgctgttcacgtaatcgacgaagttctgggtggaaaccggtgccttctggctgtcgagcgccaattcgatattccccgccgaggtcgtcagcatgacatgggtctcaccggcggcgagtgcggctggtgccactgcggacagggaacacagcgcgacgaaggtcactaaagtacgtttgaacattaacgggtcctttctctgagagacaaacaacggaaaagcgctttgattctaaagagctgtatcggcaagtgccagccatttacctatatttacccaattacgggacatatcctaggcggccctgaattttgctgcggaaagtatgggcgcagaaggcttttttgccaaccgcatcacgcattttttgccccgtgccgccctggggcggtttttgcgatctgcctcccagtttgcacacgcattgtcgttactctatataaatgagagcgctctcattataaaaaaaacggatattgaagcatcccacggcggcatcgccgcgcaacccctggagaaatgacgtgagtgaattgatgactgaagtcagccccgagtttgaaagcaccatcatggaactgctggtgttctccggcagcgcgcgcagcaatgcgttgatggcgttgcgacaagcgcgcgccggcgacttcgccgccgcggccaaacacatggccgaatccaaagagtgggtgaagaaagcgcacctgatccagaccgagctgatcggcctggacgaaggctgcggcaagctggcgatcaatctgatcaccgtgcatgcgcaggatcatctgatgaacgccatggtgatccaggatctggccgacgacatgatcgagctctatcgccgtcagtcgctgacggagggccgcccatgagcacgctcaaaatcgccgtgatcggcggcggcagcagctacactcccgagctggtcgatgggctgatccagcgcatcgaggagctgccggtcaccgaactggcgctggtggacgtcgagccaggccgccaaaaagtggaaaccatcgccgccctgacgcgccgcatgctggcgcgccatgggctggaacaggtgaaggtcagcgtgcacttcacgctggacgaagcgattcgcggcgccgctttcgtgctgacccagttccgcgtcgggcaactgccggcgcgcgccgccgacgaacggctgggcctcaaataccagctgctcggccaggagaccaccggcgtcggcggcttcgccaaagcgctgcgcaccattccggtgatgctggatatcgcccgccgggtggaaaagctggcgccggacgcctggatcatcaacttcaccaacccggccggtatcgtcaccgaggcggtgtctcgctttaccaaagcgaagatcatcggcctgtgcaacgtgccgatcagcatgcatcacatgatcgccaacatgctgcaggcgccttacgccgacgtgcagctgcggttcgccggtttgaaccacatggtctgggtgcatcaggtcacgcagcaggggcgcgacgtcaccggcaaagtgatcgacatgctgtgcgacggcgcggcgctgaccatgaacaacatcaaggaagagccctggcagccggacttcctgcgcgcgctcggcgcgatcccctgcccgtaccaccgctatttttaccagacccgtgagatgctggcagaagagatggccgccgccggcgagcgcggcacccgcgccgagcaggtgatgcaggtggagaaagagctgttcgagctgtatgccgatccgcaactgaacacaaaaccggaacagctcagcttccgcggcggttctttctattccgaggttgcgctggagctgattcgtgctatccataataatctcggcacgcaattagtggtcaacaccgcaaaccgcggcgcaatccatggcctgccggacgatgctgtgatagaaatcaactgtatcgtcgatgcccaaggcgcgcatccgctgacgttcggcccgctgtcggagccgatgcaggcgctgacgcagcaggtgaaagcctacgaacgcctgaccatcgaggccgcggtgcacggcgatcgccgcagcggcttgctggcgctgatcgccaacccgctggtgggcaacgccaatctggcgcagccgttgctggacgaggtgttgacgataaacgcgccgtatttgccgcagttcaggtaagcgcctgcgcgcggtatgacaggggttcggcgcgccgaacccatttttttagccgtaatcaggagttggacgatggtgacactggaagatgtcgcggcgctggcgggcgtatcgcgcgccaccgtatcgcgggtagtgaacggcgacagcaacgtcaaggcgccgacccgcgagaaggttgaacgcgccgtcgcccagctcggttacacccccaatccggcggcccgcgcgctcgcctccagccacagcaataccctcgggctggtgaccacgtcgtatcgcggcggcttcttcggcgcgctgatggacttcgtgcaaaccgaggccgaatcccacggcaagcagctgctggtgacccagggccgcaacagcgccgaaaacgaatggcaggcggtgcagcggctgttcagcctgcgctgcgacggcgtgatcctgcacgtgcgttttctcagcgacgatcggctgcgccagctggcggcggagcaacgtcatttcgtgttgctcgatcgtctggtgccggggctggaagaccgctgcgtcaccttcgatcatccgctcgccagccgcatggcgacccagcaactgctcgataccgggcaccggcgcatcgcctgcatcagcgggccgcgcgagcgcccgtcgagccgcctgcggttgcaagggtttgaagaggcgatgcaggcggcgaatatcgagccggtggcctgtctggagggcgtttacgatctggaaagcggttaccgctgcgccgatcgcctgctgcagcaagccgcacggcccagcgccatctactgctgcaacgaagagatggcgatcggcgcgctgctggcgatcaacgagcaccgcctgcgggtgccgcaggatatctccttgatctgttacgacagcggcgaacgcgcgccttttgtacgcccggcgttgagcagcgtacattttcccatcagcgagatggcccaatacgcggcgcgcaggctgatcgaccccaccaccccggcgcacccatttgagccgacgatcgtcaaccgtgattccattgtgacggtacgcaaatagatcacaataatgcgtaccctcccttcataggttgcatcaaaaaatcgacaaccatcacaaaaaatcccgttgtctgtgctaggatccgccccctggtggcctgatcgggacttttttctgcgtttgccaggaaaagccagcggccttatgccagcgttaaaacctctaacagacatattcaggcctatacaatgaatgacagtaaccgcatacggcttacctggatcagcttcttttcgtacgcgctgaccggtgctttagtgatcgtcacagggatggtgatgggaaacattgcagagtactttaatctgccggtttccagcatgagtaacacctttactttcctcaacgccggtattttgatttcgatcttcctcaatgcctggctgatggaaatcatcccgctgaagcgtcagctgatcttcggctttgtcctgatggtgctggcggtggcggggctgatgctcggcaagagcctgaccatgttctcgctgtgcatgtttatccttggcgtggttagcggtatcaccatgtcgatcggcaccttcctgatcacccacatgtatgccggccgccagcgcggttcgcgcctgttgttcaccgattccttcttcagcatggccgggatgatcttcccgatcgtcgccgcgatgctgctggctcgccatatcggctggtactgggtttacgcctgcatcggcctgctgtacgtggcgatcttcgtgctgaccctgtgctccgaattcccggtgctgggcaagaaaggcgccgatgccggtcaaccggtcgagaaagaaaaatggggcatcggcgtgctgttcctgtcgatcgccgcgctgtgctacatcctcggccagctgggcttcattcagtgggtgcctgagtacgccaccaagtcgttcaacatggacatcggccaggccggtaaactggtgagcgacttctggacctcttacatggtcggcatgtgggtgttcagcttcatcctgcgcttcttcgatctgcagcgcatcgttaccgtactggccgcgctggctaccggcgcgatgtacctgttcgtcagcaccgacaatccggaacacctgggctactacatcatggctctgggcttcgtttccagcgccatctacaccacgctgatcaccctcggctcgctgcagaccaaggtctcctcgccgaagctggtcaactttatcctgacctgcggcaccatcggcaccatgctgaccttcgtggtcaccggcccgatcgtggcgaaaggcggcgcgcacgcggcgctgaccaccgccaacggcctgtacctggcggtattcgtgatgtgtctgctgctgggcttcgtgaccaagcaccgcagccacggtcacgtgacgcactgatttcttcgcatcaaatacatcaagggcgcccgcaaggcgcccttttcttgcgccttagcgccgaaaatccaccgtctcatcctgctgcaaatgcagcgtggtttccgccggccgcgtttcggcgatcaccgccccctggcgaatcgaataacgcaccggcgtctggcggcgcaccgcgtcgaaaccgctttccgccggcaggatcaccaggttggcgctgttgccggccgccaggccatagtcgctgaggttaagggtgcgcgcactgtggctggtgatcagcttcagcccgtcgtcgatttggccatagcccatcagctggcacacgtgcagccccatatgcagcacctgcagcatgttggcggtgccgagcggataccagggatcgaacacgtcgtcgtggccaaagcagacgttgatctccgcctccagcatctccttcacccgcgtcacgccgcgccgtttcggatagctgtcgaaacgcccctgcaggtgaatgttcaccagcggattggcgacaaagttgatgccggacattttcagcaggcggaacagccgcgaggcgtaagcgccgttgtaagagtgcatcgccgtggtgtggctggcggtgactttcgcccccatctccagcttcagcgccagcgccgccacggtctcgacgaagcgcgattgctcgtcgtcgatctcatcgcagtgcacgtccaccagccgatcgtatttttgcgccagcgcgaacgccttgtgcagcgactccacgccgtattcgcgggtgaattcgaagtgcggaatggcgcccaccacgtcggcccccagccgcagcgcttcttccagcagcgcttcgccgttgggataagagaggatcccctcctgcgggaaggcgacgatctgcagcgttacccagggcgccacctcccgtttcacctccagcatggcgcgcagcgcggtcagcgtgggatcggaaacgtcgacgtgggtgcgcacatactgcacgccgttggcgatctgccacttgagcgtttgccaggcgcgctgcttgacgtcttcatgagtcaacagcgccttgcgttcggcccagcgctcaatgccctcgaacagcgtgccggactggttccaggccggctgaccggcggtttgcgtggtatccaggtgaatatgcggttcgacgaacgccggcagcgccagcccgccctgcgcatccaacacgtcgctgcgccactccagcccttccggttgcggaaccagatgcgcgatgcgcccctgctcgatcgccagttgccacaacccttcatgcccgcttaaacgcaggttatcgataaacttcaatggacgtttcgccacccttcacctctgccgttgcgctggttttcttcatcatactggcagcggatcgcgctgacaaagtcaccgtttcatgcctaccccctgcgtttactccctgcggggtaatttgcatgcaaactgactcgcttcagctaaaggtgaataaaatccgcaacttatcaaaaaacgtgaaaaatcatccatataccacgttagaggtatataagagtgtgattgatttgcatcaataaattgcccctcgggagagataaggtaagcctaggaaacccgaattttgaggcaataatgagcagagtcaaacttgccgtcgtcggcaatggcatggtcggccaccggttcatcgaagatctgttggataaagcagacaaagaccaattcgacatcaccgtattttgcgaagagccgcgcatcgcttacgatcgcgtgcacctttcctcctacttctcgcaccacaccgccgaagagctgtcgctggtgcgcgaaggcttttacgaaaaacacggcgtgaaggtgctgatcggcgagcgcgctatcaccatcaatcgcgacgagaaggtcatccactccaacaccggccgcaccgtctattacgacaagctgatcatggccaccggctcttacccgtggatcccgccgattaaaggctcggatagccaggactgcttcgtttaccgcaccatcgaagacctgaacgccatcgaagcctgcgcgcgccgcagcaagcgcggcgcggtagtcggcggcgggctgctggggctggaagccgccggcgcgctgaaaagcctgggggtggaaacgcacgtgatcgagttcgctccggtgctgatggccgaacagctcgacccgatgggcggtgaccagctgcgccgcaagatcgagcgcatgggcgtcaaggtgcacaccggcaaaaacacccaggagatcgtcaacggcggcggcacggcgcgcaaaaccctgcatttcgccgacggcagcctgctggaggtggatttcatcgtgttctccaccggcatccgcgcccaggacaagctggcgcgccaatgcgggctggagattggccgccgcggcggcatcgccatcaacgacagctgccagacgtcggatccggacgtgtacgccatcggggagtgcgccgcctggcgcgatcgcaccttcggcctggtggcgccgggttacaaaatggcgcaggtggccgccgatcacctgctgggccgcgaaaacggcttccagggcgccgacatgagcgccaagttgaagctgctgggcgtagacgtcggcggcatcggcgatgcccacggccgcaccgagggcgcccgcagctacgtctatctggatgaaagcaaagaagtctacaaacgcctcatcgtcagcgccgacaacaaaaccctgctcggcgcggtgctggtgggcgacaccagcgactacggcaacctgctgcagctggcgctgaacggcatcgaactgccggaaaacccggacggcctgatcctgccggcccatgcgggcagcaaaccggccatcggcgtggattcgctgccggaaagcgcgcagatctgctcctgcttcgacgtcagcaaaggcgacatcatccaggcggtcaacaaaggctgccacaccgtggcggcgctgaaggccgaaaccaaggccggcaccggttgcggcggctgcatcccgctgctcacccaggtactgaacgccgagctgagcaagcaaggcatcgaggtcaaccatcacctgtgcgaacacttcgcctattcgcgccaggagctgttccacctgatccgcgtcgaaggcatcaagtcgttcgaggcgctgctgaccaaatacggcaaaggctacggctgcgaagtctgtaagccaaccgtcggctcgttgctggcttcttgctggaacgagtacatcctcaagccgcagcatacgccgctgcaggataccaacgacaacttcctcggcaatatccagaaagacggcacctactcggtgatcccgcgctccgccggcggcgaaatcaccccggacggcctgctggccatcggccaaatcgccaaggagtacaacctctacaccaaaatgaccggttcgcagcgcatcggcatgttcggcgcgcagaaagacgacctgccggccatctggagcaagctgctcgccgccggctttgaaaccggccacgcatacgccaaggcgctgcgcatggcgaaaacctgcgtcggcagcacctggtgccgctatggcgtcggcgacagcgtcggcttcggcgtcacgctggagcaccgttacaaaggcatccgcaccccgcacaaaatgaagttcggcgtctcgggctgcacccgtgaatgcgctgaagcacagggtaaggacgtcggcatcatcgccaccgagaacggctggaacctgtatgtctgcggcaacggcggcatgaaaccgcgccacgccgatctgctggccgccgatctcgatcgcgagaccctggtgcgttacctagaccgcttcatgatgttctatatccgcaccgccgataagctgcagcgcacctcggtgtggctggagagcctggaaggcggcatcgattacctgcgcaaagtgatcgtcgacgacaagctcggcatcaacgcgcagttggaagccgagatcgcccgcctgcgcgacgcggtggtctgcgaatggaaagagaccgtcgagcacccggaaacgcagctgcgcttcgcccacttcatcaacagcccgctgcgcgatccgaacgtgcaggtggtggccgaacgcgaccagcaccgcccggcgcgcccggacgagcgcattcccgtcaccctgatcgataccgaggagagtcacgcatgagccagtggattaccgtttgtcccgtcgccgacattctgcccggcaccggcgtgtgcgccctgatcggcgatcggcaggtggcggtgttccgcccctatgccgacgaacaggtgttcgccatcagcaatatcgatccgttcgcccaggccagcgtgctgtcgcgcggcctcatcgccgagcatcagggcgaattgtgggtcgccagcccgctgaagaaacagcgtttccgcctgtacgacggtcactgtctggaagatgacagtcgttccgtcgccagcttcaccagccgggtggtcgacggcatcgtgcaagtcgcggcataacctttcgggggcgcatcccgcccccacgccgataaccccgaggaatgccgatggactacctgccgattttctgccaactgcaacacaaagcctgcctgctggtcggcggcggcgaaatcgccgaacgcaaggcgcgcctgctgctggacgccggcgcggcgctgaccgtcaacgccctggccttcagcccgcagttccaccagtgggcggcagaaggcctggtgacgctggccgagggagaattcagcccgagcctgttggcggaaaaatggctggtgatcgccgccactgaccggctggaggtcaacgcgcgggtgtaccaatgcgccaaccagcagcgggtgttctgcaacgtggtcgacgacccgaaacgcgccagctttatcatgccgtcgattatcgaccgttcgccgatcatggtggcggtgtcctccggcggcaaagcgccggtgttggcgcggctgctgcgcgagaagctggaagcgatgctgccgcaacacctcggcaagctggcccaactgggcggctcgctgcggcagcgggtaaaacaacgcttcagcggcctcggcgcacgccgtcgcttctgggaacggttgttcgctcacgatcggctggcgcaatcgctggccaacggcgacgccgcgctggccgaacgccagctcgaacagctgttcagcgaacagccggcagatcgcggtgaagtggtgctggtgggcgccgggccgggcgatgccggtttgctgacgctgaaagggctgcaacagatccagcaggccgacgtggtggtttacgaccggctggtctccgaagagatcatggcgctggtgcgccgcgacgccgagcgcatcttcgtcggcaaacgcgccgggcaccactgcgtgccgcaggaacagatcaaccaaattctgctgcagcaggcgctgcaaggcaaacgcgtggtacggctgaagggcggcgatccctttatcttcggccgcggcggcgaagagctggagacgctggcggacgccaacgtgccgttctcggtggtgccgggcattaccgccgcctccggctgttccgcctacagcggcatcccgctcacccaccgcgaccatgcgcagagcgtccgcctggtgaccggccacgccaaggccgacggtggattggactgggcgacgctggccgccgggcaacagacgctggtgttctatatggggctgtcgcaagcggcggaaatccagcgccggctgatcgcgaacggactgccggccgccacgccggtggcgctggtggaaaacggcacctcttgccgccagcgggtgatcgaaggcgagctccaccaactgggcgccttgtccctgcaggccgccagccccagcctgatcatcgtcggcagcgtggtcagcctgcgcagcaagctcaattggttcgccagcgaggaatcgcccgccagcctggcgcaaatggcgtaataccgacgtaaaaaaagcggccttaggccgctttttttatttgcgccggcgttacgcctgcggcggtacgaaaccgacggcctggtagaccttcgccagggtttcctgcgcgcgtgcacgggccttggcggcgccgtcgcgcatcacctgctgcagataggcttcgtcgttgcggaagcggtggtagcgctcctgcagctcagccagcatgccggagacggcttccgccaccgcgcctttcaggtggccgtacatctggccttcaaactcggcttccaactgcgcaatgctcttgccggtcacgccggcgaggatatccagcaggttggagacgcccgccttgttgaccacgtcgtaacgcacgacaggcggctcttccgagtcggtcattgcgcgtttgatcttcttggtcaccgctttcggatcttccagcaggccgatcacgttgttgcggttgtcgtccgacttggacatcttcttggtcggctcctgcagcgacatcacgcgcgcgccggatttaggaataaacggctccggcactttgaacacgtcgccgtacagcgcgttgaaacgctggcccacgtcgcggctcagctccaggtgctgtttctgatcttcgcccaccggcacctgattggtttgatacagcaggatgtccgccgccatcagcaccggatagctgaacagcccggcgttgatgttctccgcgtagcgtgcggatttgtccttgaactgcgtcatgcggctcagttcgccgaaataggtgtaacagttcagcacccagctcagctgcgtgtgctcaggcacgtgcgactgcacaaagatggtgcttttttccggatcgatgccgcaggccaggtacagcgccagcgtatccagcgtggccttgcgcagcttctcggcgtcctggcgcacggtgatggcatgcagatcgacgatgcagtagatgcagtcgtagtcgtcctgcatctgcacccactgacgcagcgcacccatgtagttgccgatggtcagttcgccggacggctgcgcgccgctaaatacgatgggcttactcatgtttaaatttcctgattctctaaagatgacagcccaagagcgggcaacaaatcggcgaagcgctccaacacccgatcggggtggctcagggcgatcgattcaccgtagttataaccgtaggtaaagccgacgctcgggcaaccggcgccctgagcggcttgaatatcgttgcgtgagtcgccgacgaacagcagttcatgcgcgcgcaggccaagcttgccgagcaccaggtacaacggcgccgggtgcggtttcttttccgtcacgtcgtcgccgccgatcaccagcgagaaatagtcgccaatgcccaacgctgccagcagcggcgccacgaacggcgtcggcttgttggtcaccagcgccatcgggtaaccgtgcgcggccaggcgggccagcgtctcttgcacctgtgggaacagacggctgccgctgtcgacggtctgcgcgtagaaatggtcgaagcgttcacgcagccggctgcactgctccggcgtgccttccgcctccgcccaacgcagcgcgcgctgcaccagcacgtcggcgccgttgccgatccaggtgccaacccgctcctcacccgcttgcggcaggcccgtctcttccagcgccatatcgatggcggccgccagacccggcgcgctgtcgaccagcgtgccgtccagatcgaaggccaatgcgcggatcgcgccgaaatcagccatgggtaaccttcgccagctcgctgcgcatttcgtcaatcaccttgcggtagtccggctggccaaagatggcggaaccggcgacgaacatatcggcgcctgcggcggcgatttcggcgatgttatccactttcaccccgccgtcgacttccaggcggatatcgcgaccgctgtcgtcgatcagtttgcgtacctggcgcagcttgtccagagtgccgtggataaacgactggccgccgaagcccgggttgaccgacatcagcaggatcacgtcaattttatccatcacgtaatcgaggtagcttagcggcgtcgccgggttgaacaccaggccggccttacaaccgtgctctttgatcagctgaatggtgcgatcgacatgttcggaagcttcggggtggaaagagatataagacgcgccggccttggcgaaatctggcacgatgcgatctaccggcttgaccatcagatgcacgtcaatcggcgcggtaatgccgtagttgcgcagcgcttcgcacaccatcggaccgatggtcagattgggcacgtagtggttgtccatgacgtcgaagtgcaccacgtcgccgcctgcggccagcacgttagcggtatcttcacctaaccgggcaaaatctgccgacagaatggacggggcaatcaaaaactttttcatccgcttctccaaacgtagggtcgagttgttatgcgccggggtgcccccggcttagcgatacagcgccaaaagctcgttcactttgctgcggccgagaatattgcggctgatcgtgcggcgcgctttcaccacatacagcgcagcatgctggtaccagtcgcgcgtcagctcggtatcgtgattggagatcaataccggtacctggctctctaccgagagctggtgcgccagatgcgccaaactctgctgatcggcaatgctgaagctgttggtgtggtaagcggtgaaattcgccgtcgccgacagcggcgcgtaaggcggatcgcaatacaccacggcaccggccacggccttcgccatggtatcgcggtaatgctcgcagacaaaagtggcattgcgcgatttttcggcaaaccagtagagctcttcttccgggaagtacggtttcttgtagcggccgaacggcacgttaaactcgccgcgcaggttatagcggcacaggccgttatagcagtgacggttcaggtacaggaacagcagcgcccggcggtaaggctcggtgctagtattgaactcttctcgcagcaggtaaaactgatccgagttattgaattcatcggcgaaaagcgtgcgggcatcgcgcacgaagtcatccgtgcgcagcttaacgatgttatacaggttgataagatcgctattgatgtcggcgagaatgtaggcgtcgtaatccgtattcagaaagacggatcccgcacccacgaagggctcgattaagcagtctcccgccggcagatggcgacgaatctcatctaccagcgggtattttccaccagcccattttaaaaaagcgcggtttttcttcatgccgtcaattagctacttatacaattcagagcggcggattgtactctgtttcagacagcacatcagcgcacaaatttaaatgatttattttttaagatcttgctgcacttggtgtacaggtcggacccacggttttttcgcctgcacatccgccggcaacgaagcaatggcgcgcttcgcttctgcggaagaagcatagttgccgctcaccagtacgtaccacggcttgccgtcacgcttggtggcgtacaccaggtaattctgcagcttctgctgtttggcgtaggcgttcagcgtatcggaacgcgaagcgctgctcagctgcaaggtatagtggctgcccggcgcagactgcacagagctgccgctgctggcgaccgctcccgctttcgcggtggaagacggcctggccggcggcgtatacaccgtggtcggtgatttatgctgcgttgcggtcggtttggcggcggcagttttcgccggcgttttatgctgttgcggcgcggttccctgcacaggacgcgtcgcttcgcgcgctgcggcaccgctcatcaccgtcgccggtgcggtcggcaacgtcgacgctgcgccggtcatgccttgggtcgccgcatccacctgtccctgctgctgcgacaacgcatccgccatgttgcccggcaaatcgacgcgctgctgcgcaccgccctgctgaggctgcgtttgcgcttcggtcggcgtgccggagatcggcggaacgctgacgttctgcggttgctgcggctgagtcgcgctcacgccgttgttatcgtgggtatccgtggtaccgcccggcacgccgttgttggcggtagtcagcgacgaagaaccggacaggttgatatcgcgggctccgccgttttgcgcgccgttctcctgagccgcttcatgtttggtcggcgccttcagggcggaaccgatgccgataatcagcagcagcagcaccaaaatgccgatgccaatcatcaaatgttggcgtgaaacggcgaagcgcggcgcggcggccggcttgcgcgagcgcgtagggcgacgatcgctgctatcaggtctgagatcgtcttccggtttaaactcgtccatctgaaaccctccaactagaggcaaaagcccaccaccgtagacctaccgtggcacgggcagattaacccgatgatggcaaagcgacacccgtcgtgctctgctcactgtattaatatagatgcaaatggcggctaagccactgttacttagtccgatttaattacgcgtctgctcaggcaggcaggcggcgatcgacgccaacaccagctcatgccctacgcctccgcgcacttccgccgcaccgatcgcggtcggcagcaccaggcgcagttcacccgccagcactttcttgtcgcgcagcatgtgcggcagataggattccggcgtcatttcctgcggcccgcagaccggcaagccggcgcgcagcagcagcgttttgatgcgttcgatatcttcaacggagaactggccgagacggtgcgcggtttccgccgccatcaccatgcccgcagccaccgcttcgccgtgcagccatacgccgtagcccatttcggcttcgatggcgtggccgtaagtatggcccagattcagcaaggcgcgcaggccgctttcgcgttcgtcggcggccaccacctcggccttgagctcacagcagcggcggatacagtaggctaacgcctgcatatccagcgccatcagcgcatcgatgttgttttccaaccagacgaagaactcgcgatcgaggatgatcccgtatttgatgacttctgccaggccggaagagagttcacgcgccggcaaggttttcaggcaatccagatcaaccaccaccgcagcgggttgatagaaagcgccgatcatgtttttgccgagcgggtggttgacggcggtcttgccgcccacggaagagtccacctgcgacaacagcgtggtgggaacctgaataaagcgcacgccgcgttggtagcacgcggcggcaaagccggtcagatcgccgacaacgccgccgccgagggcgatcagcgtggtatcgcgcccgtgcggtttttccagcagcgccgaaaacacctgctccaacaccgccagagatttgtactgctcaccatcgggaaggatcacctgatccaccacgacgccgccctgctccaacacctgccggacacgctcaagataaagcggcgccagggtctggttggtgaccaacatcgcttgctcacccgccttcaacggcataaaagaagccggatcgttaaacaatccggcggcgatggtaatcgggtagctgcgctccccaagcgttacagtaattctctccatgtcgcgctcagttctctgtatggtgcggcggtggttgatccccgctgcggcggggaacacaaatcagttttccgcattggccgacggcgaacgcggaaagcggcaatcagttgctttccagcatgttgatgatctggttggcaaccactttagcgctctgatcgtcggtgcggatggtgacatcggcaatctcttcatacaacggattgcgctctttcgccaaggcttccagcacttcacgcggcggagaatcgacctgcagcagcgggcgttttttatcacgctgggtacgagcaagctgcttctcgatcgtggtttccagatagaccaccacaccgcgcgcggacagacggttgcgcgtttcgcgcgacttcaccgaaccgccgccggtcgccaacacaatcccttgtttttccgtcagttcattaatgactttttcttcacgatcgcggaaaccttcttccccttccacgtcgaatacccagcccacgtcagctccggtacgtcgctcaatttcttgatcggagtcgaagaactccatattgagttgctgagctaactgacggccaatagtgcttttgccggcacccataggcccaaccagaaagatattgcgtttctctgccatgtttttcggtattactaagacaattcgttaatgttaacccgccccgccaatcaaatcagcggcgggacctaaactgaaacctcatgagcgatagtgcgagatcagacgaaaaattatctcaacactcttggtagtttggcaaccgaataaatcgcaatccacgccgcgggagggaaaccatatgtttttaacggcgtcttgacgctaacaaaaaacctcggtgctcaattcggtaacccttgtaagctaaatcggccgcagcgtcaaacgcagatccccccaaggagataaaaaagtgtatctgctcatcaactttaggagatttgccgcccggccgacaggccgccgcttatcccttaatcagagtcggcgtaatgaagatcaccagctcgcgtttttgctgttgtgcgccgctttgtcggaacaagcctcccaataacggcacatcccccaaccccggcaccttgtccgccgtcttgccgctatgccgttgaaaaataccgccgagcaccagggtttcaccgtttttcaccgtgatctgcgtcttaatctcctgtttatcgatggtcagtgcctcacccgccccgcggctgatagcgcgccccggcatattttggctgatgtgcagcgtcagcgtgatgcgcccgtccggcaacactttcggtgtcacctccatgcccagcaccgcctctttgaactcgatggcagtcgcaccgctggcgccgcttgacacttcgtaagggatctcggttccctgcttgatactggcggtttgcaggtgcgccgtcagcaggcgtggactggcgatgatctccacctgattctcctgctccagcgccgtcagctccaggctcagcaagcgcccgctgatgcgcgccagatggaaaccggcgttcaccgcgctgcgctccagcggcaggttgacaccgacattgcccggccgcaacggccgcgccggcctgtcgtcgggcgccaacccccaacgcacgccaagctcacgcaggctttcgcggttgatggtcacgatatgcgccgccagttgcacctgcgccagcggcgcgtccatttccgttacccgctttttcaactgcgtcaggattggcgcggtgtcgcgcagcagcagcgtattggtgcgtttatccgccaacacgctgccacgctcgctcagcaacgcgccacgttgggcgttgaggctttcggcaatttccgccgcatcgccgttctgtaacgtcaaggtcaggctgtgcagcggttgccgctgcgccaacgcctctcgctgctgccttttttcctgtgcgtccggctccggcgagatcagtatcacgttgccttcccgcgtcatcgccagtttgcccatgcgcagggtcaacgccagcgcctgcggccagggcacattctccagccgcagcgtcaggttgccgctcacgccgggcgcggcgatcaggttcatctgccgataatccgccaacgcctgcaggatgaccgtgaccggcgcatcctgaaattccagggaaacccgctgtttatcctgcgcctgcgcggtgccgagcgccaggcaccacagcgccaagcccaatccagcacatcctttcatggtttgccatccttgttgtccatcatgagcgagacgtcgccctggctcgccgggcaatctggttcggccgtcagcgccgttaacgtcaggctacgcgcctgcacctgcgtcaccagccagcgctcggccagcacccgttgctgcggccgcaggcgcaaccattgccccgccggcgtcaccacccagccatagcgcagcgtcggttgcccgatgacgcctttcagtcgccagcccgccggcgacgcctccgtttgggcacaagcaggcatcggcagcggcgcaaacgggtcgcgcggctcagcgcacaatgcccatggccatagcaaccaccaccaacggccgagccttttactcattgggttgatcctcggtggcatcctgcaaaaccaaccgcgccgtcatgccaagggacggcgtctccacgctcagctgctcaaggcgtaaatcggtgggcagcgtctccagcagcgccagcaaaccggcgtagtcaatgcgcaagctcagcgtttgccgcggcggtttttcctgccgctgccagcgcaacaacgcgcctcccgcccgttgcagcacgctcgccagatcgccggtggtggacggaggtagcggcgccgccgggatagcggtttccggcacctcgtccagttggcgttgcaccatggcgatctgttgcagcaggcgctgttgccgctccgccgcgctttcccgctgacgccattcgtcttgcagcatccagccgccgcccaacagcgccaacgtgccgatacccaacccttgcgacagcagtaatagccagcccggcaagctcagccagaggcgcagcccggaggacaaacggttatccatcacgcccccactgcgccgccagatgaaaggtgtacaggccgtcgtcgcgttgcgccacctcagccaaacgcaaccgcggcaacgcaggcatccccgccagccgccgttcgaactgcgtgatggccgcaggagagcggctcaatccgcgcagccgcaggccgttcaccgcatcactctccatcgccgtgagccacagcggtggaggaatgctggaggacaattgctgcagcagctgaaaataacgccggttatgttgggcattgctcgcctgccgttcggcgcgggcgcgctgcagcgcccgctgcgcccgctcttgctgttgctgacgggcgagcaacgtcagtgccgccagctcttcacccagcatcgccagccgcgcctgccgctgcgcctgttggtgacgcaactggccggcgaccaggaacagcgtcagcagcagtgccgttagctgcaacagcagcacgcccaaccagaaatagccgcgtcgccgctcgcggcgttgtcgccagggcagaaagttgacctgatacatcagcgatcctcctcgcgcagcgccaggccaccggccaacgcgaacgccgaaggatgcgcaggcaacggcggacgcagctgcgtgaaagcgctgagcggcgaccaggcaaggcaaccggcgggcaaggcacctgccagcacgctgccagcatagatcggccgatcgtcgcccgccggcatctgggcttgcagcacccgcagcgcctgcgcgtcatcgtcgcccggcgccagaccaaaggcgaacgcgccgtcggccggcgccacccacagccattctcgttcgagacggtgcatcagccccgcagcgggcggcacgcctgccgccgtcgccatcatccgcagcgcgcagggggtgatatcgaccgcttgcggatgcaggccagcctgacgcagacaatgcagccactgctgcagctcctgccgccgcgcggcggtcagcaacagcgccgcctcatccgccggcgcggtgcgatagtcgagcgccagcgtctggccgtcgagcggaaactgcttcacaccgtggccgccgatatagtcgctgcgttccggctcgcgcagccgcgcgtccggctgcgccatgcgttgctgcaacacgcgctgcgccggcagggcaatgcgtaaggaaatatgtcgcggcagttggacgcgccattgccgcagcgcccggataagaaattcggaaggttccagacagccatcgcgtaaaaccgcctgcggcagcgcctgctgccaccagtggcgcaactgccagccgttgcggcgccgttgggccgccaccgcccgcacgcagtcgatttgtatatccagccccacctgccatgcttgagggaacatgtttcgcaagcctccataacatcagatgataaaagaacatatccatgtcgcaggcttgcctttatactaccgcgcggttgtttataaactgcccaaatgacttagaaatgggaaatctcaggtgaagttcgtaaagtatttactaatccttgcagtatgttgcatcgtgctgggagcagcctcgattttcggcttgtacaaatatgtcgagccgcagctgcccgacgtcgcaacgctgaaagatgtgcggctgcagataccgatgcaggtctacagcgccgatggcgaactgatcgcccaatacggcgagaaacgccgcattccgctgaaactggatcaaattccgccggtgatggtgcacgcattcatcgccaccgaagacagccgcttctatgatcaccatggcgtcgatccggtcggcatcttccgcgccgcctccatcgcgttggtctccggccacgcttcgcagggggccagtaccattacccaacagctggcgcgtaacttcttcttaagcccggaacgcaccctgatgcgtaaaatcaaggaagccttcctggcggtgcgcatcgagcagatgctcaccaaggatgaaatccttgagctgtatctgaacaagatctatctgggttaccgcgcctacggcgtgggcgccgccgcgcaggtctatttcggcaaagacgtcagccagctgaccctgagcgaaatggcgaccatcgccggcctgccgaaagcgccatccaccttcaacccgctctattcgcacgatcgcgccgttgcccgtcgcaacgtggtgctgtcgcgcatgctggacgaacactacatcacgcaggcgcagtacgatcaggcgcgctccgaagacctggtcgccaactaccatgcgccggaaatcagcttctccgccccgtatctctccgagatggtgcgtcaggagatgatcaagcgctacggtgaaaacgcctataccgacggttataaggtttacaccaccgtgaccaagcggctgcagctggcggcgcaggaatcggtgcgcaataacgtgttggcctatgacatgcgccacggctatcgcggcccgtcaaacgtgctgtggaaagtcggcgaagcggcctgggatcgcaaacagattgtcgactcgctgaaaaacctgccgaactacggcccgctggcgccggcggtgatcaccgccgccaacccgcaggaagcgacggcgatgctggccgacggcagcagcattgccctgccgatggcgaccatgcgctgggcgcgcccataccgttcggacactcagcagggcccaacgccgaaacgcgtcaccgacgtagtgcaggccggccagcaagtgtgggtgcgtaaagtgaacgaagcctggtggctgtcgcaggtgccggacgtcaactcggcgctggtctctatcaacccgaacgacggcgcggtgaaagcgctggttggcggcttcgatttcaaccagagcaagttcaaccgcgtcacgcaggccctgcgtcaggtgggctcgaacatcaaaccgttcctgtacaccgccgcgatggataaaggcctgacgctggccaccattctgaatgacttgccgattacccgttgggatgccggcgccggcaccgactggcggccgaagaactcgccgccgacctacgacggcccgattcgcctgcgacaggggttggggcaatcgaagaacgtggtgatggtgcgcgcgatgcgcgcgatgggcgtcgattacgcggcggaatatctgcagcgcttcggcttcccggcgcagaatatcgtgcataccgaatcgctggcgctgggctccgcctccttcaccccgatgcagctggtgcgcggctacgcggtgctggcgaacggcggttacctggtcgatccgtacttcatcaccaaaattgaagacgataacggcaatacggtgttcgaagccaaaccgaaagtggtgtgcggcagctgtaacctgccggtgatctacggcgatacccaccgttcggcggtgctgtccgacgacaacatcgaaaacgtcgccacctcgcaggaaggcaacaacagcacggtgccgatgccgcagctggagcaagtcaccccggctcaggtgcagcaggacggcgaccaacagtatgcgccgcacgtgatcagcacgccgctggccttcctgatccacgacgcgctgaacagcaatatcttcggtgaaccgggttggatgggcaccgcctggcgcgccggccgcgatctgaagcgtcatgatatcggcggcaaaaccggtaccaccaacagttccaaggacgcctggttctccggctatggcccggataccgtgacctcggtgtggatcggtttcgacgatcaccgccgcgacctgggccgttcgacggtatccggcgctatcccggatcagatttccggcggtgaaggcggtgccaagagcgcccagccggcgtgggacgactttatgaaaaccgcgctggaaggcatcccagagcagaaagtcacgccgccgccgggcatcatcagcgtcaccatcgacaagagcagcggcaagctctctggcggtggcggcggcagccgttccgagtactttatcgaaggaacgcagccgacggactacccatcgcgcgataccggcaccacgctgaccgatccgggcggcgaaagtcacgagctgttctgatcgaaaagggccagagaaatctggccctttttttattcggcgtgaagcgtatcagcgcgacgcgcgcaaaaatgcctcggaaaggaacagcgcgctgacgttgcgcgcctcacggaaatccggttccgccagcagcgccatcatgttggcgatcggccagcgcacctgcggcaagggctccggctcatccccttccaggctctgcggatagagatcgtgcgccagcacaatattcattttgctggaaaagtaggacggcgccatcgtcagcttactgagaaaatcaaagcgtttcgcgccgtaccccacctcttccatcagctcgcggttggccgcctccagcactccttcaccgggatcgatcaaccctttcgggaaccccagctcataggattcggtgccgaccgcatattcgcggatcagcagcaggtcatcgccaatcaccggcacgatcatcaccgcttcgcgatccgaaggccgcatgcgctcatacacccgccgaacaccgttgctgaattccaaatcgaccgactcgacgttaaacaaacgcgaacgcgcgaccgtttccactttcagaattttaggtttttgcaggtgtttatccatgattgcctcaaagaggttacccaggcgcggacggggcaaccgaaaaaatgattggcgtaacgcacggctcgttggcgctcaaacgctgaccaaattcgatcctgatcacattgtgcgttaagggcaagctccgccgcaacgcgcatgaacagtaatttactttcttttaacaagcgtagccagcggccggcgattttccgtactgattcagcaaacagcgcgcaagaaaataggataataccgatatcgacgacagaggccggttgctagtatcacgcaggcaagaatcagtgataaaatggccttgcgtcatgaaggaatgagatccagagcgagaatctgtttgttccctcattagttctgggtgcctcctggcggtttactccgtataatattcagcttttcatcaggttggcgaaattcacgggtgtgagatggggattgcatgagcacaatagtgttgatattggccttagtgcttgtctgcctgattgccgccggcctgtacctgtggttcaaggcccgcaacccgtcggcgctggcgcacgcattgccgtttatcaagcctgcccaccgcaagctgaccgacgaagagcgcgccgcggtcgagttctatctcagtcagcaaaacaaactgagcaacaaactgttgcccggcggcggcgctacgctgcccgcggccaagctggcgctcaccccgcaaagcgataacgtatatccggtcacgcacgccatcacccgctacgggctggccagcgacgatcccaataaatggcgctattacctcgacgcggaagaggtgcatctgccgccgttttgggaaccctatatcaccgccgacaaccatgtggaagtgatcagaacccagacgctgccgctggtgatttcgctcaacgggcactcgctgaaagatcacattcacgaccggccgcagccgccggtggtggccgccacgccgaccaaaaacgcgtccatccgcaaggaagagagcgagcatgtcgagctggtcaatattcgcaaggaaacgccggaagagcatgcgctgaaccggccgaacggcatccgcgaagccgtcatcatctccgccgcactgctgctgctgttcttcagcctgataagcccggtgctggttatcccctggatgatttttgtggcggtgctgatgatcgcctggggatgctggaacctgttccgccgtccggcgtcgcgtgagctgaaagagatccactgcctgcgcggcacgccgaagcgctggggcctgttcggcgagtccgatcaggggcagatcagcaacatttcgctcggcatcatcgatcttatctacccaccgcattggcagccgtacctgactcaggatctgggcaagaccaccgatgtggacgtctacctcaatcggcaggtagtgcgccaggggcgcttcctctcgctgcatgacgaagtgaagaatttcccgctgcagcagtggggccgcaacgcggtgctggtcgccagctcggcgctggtactgctgttgctgttgatctatatcccgctcaacctgccgctgaccctcagcatggcctggctgcagggtgcgcaaaaagtggaagtgaccagcgtgcaggccctggaagccacgccgctgcgcatcggcgacacgctgaaagtgcgcggcagcggcatgtgctatgtgccgccgccggccaacggtggcggcaccgtcaattttgcgccgttcgactgctccggcatctattggaacaacgccgccccgctgccgcagccggaatcggaagtcatagacaaagcgacggccctgctggccacggtcaacagccagctgcatccgagcggcgccgatcagaaggtcaacccgcagctagccagcgccatcgagaaatccggcatgatcctgttggatgacttctctgatatcgttttgaaaacccaggatttatgtcaggcagaaaacgactgcgtgcggttaaaaaacgccttggtcaacctgggcaacgccaaaaactggagcggcctgatgaaacgcgccagatccggcgcgctgcaaggcgtcaacgttctgctgcgcccggtgagcgccgagtcgctggaaagcctgaccaaagtggccacgtcatcgttcatcttcaatgaaacgcgcctggccgccgcggcgctcaacagcccgccaccgggcggtttcctgatccgcagcgacgaaggccgccaactggtcagccacccgcaatcctcggtgccgcaaagcgaatacaacgccctcgaccagtggaatgaactgcagcgcctttccactctgctgttgcataccccgttccaggcccagggggtgatcaccagcctcagcgtcgatgccaacggcacccgccacgtggcgctgcacagcgaaccggacatgatcaccctgtggcgctacctcggcaccagcctgctgttgctggcggtggtcgtcagcctgggctataacgcctggcggctggtgcagcgtcggcgcataaatcaacaccgcgtcgccgatatccagcgttactacgacagctgcttcaacccgcagctcaatccgatgtcgatgcggccgatgccctgaacctgacgccggggcctccgccctgtcatctgcttatgctacgctaacgctattattctcatctgcggaccgcccgtcggttcgcccgtggagtttttatggttcccgagtttgattggccgcagatcgataccgtgctgctggatatggacggcaccttgctggatctggaattcgacagtcacttttggctcagcctggtgccgcaagcgctgagcgaaaggcgcgccattccgtttgatgaagcccgcaatattattgagcgggaatatcaggcggtgcagcacaccatgaattggtattgcttcgattactggagcgagcggttggatctggatatctaccgcatgaccagcgaagtgggcagccgcgcccggctgcgcgaggacaccgagccatttttacgggcgctgcgcggcgccggcctgcaaaccattttgctgaccaacgcccatccgcacagcctggcggtgaaaatcgagcataccggtctggatcggcaccttgatttattgttttccacccacacatttggttatccgaaagaagatcagcgtctgtggcaggcggtgcaacagcacaccgggttcaacccgcagcgcacgctgttcgtcgacgacggcgagccgatcctcgacgcggcgcgcactttcggcattcgttactgcctgggcgtgcaaaacccggactccagcacggcggagaaaagcttccagcgccatccgtcgatgcgcgactatcgcctgctgataccggcgctggccaagggggaagcatgaaggaaaaagcgacgcgcgacgacgcggtccggctggataagtggctgtgggccgcacgcttctacaagacccgcgcgctggcgcgcgaaatgatcgacggcggcaaggtgcattacaacggccagcgtggcaagccgagcaagattgtcgaacttaacgccgagctcaagctgcggcagggcaacgaagaacgtacggtgatcgtgctggcgctgaccagccaacgccgcggcgccggcgaggcgcagcaaatgtatcaggaaaccgaagccagcatcgccaaccgcgaaaaaatggcgctggcgcgcaagatgaacgcgttgaccatgccgcatccggaccgtcgtccggacaaaaaggagcggcgcgacctgatgaaatttaaatttggtgagccggaataacccctcaccgcaatgagagaagattatgtccaaccatgaccaattgcaccgttacctgtttgaaaactacgcggtgcgcggcgagctggttaccgtcagcgaaacctatcagcagatcctgaataaccacgactacccggcgccggtgcaaaaactgctgggcgagctgctggtcgccaccagtctgctgaccgcgaccctgaagttcgacggcgacatcaccgttcagctgcaaggcgacggcccgctgaagctggcggtgatcaacggcaacaaccgccaggagatgcgcggcgttgcgcgcacccaggcgcctatcgccgacgacagcaccttgcatcagatgatcggcaacggcgtcatggtcatcaccatttccccgacggaaggcgagcgctatcagggcgtcgtcggcctggaaggtgaaaccctggccgaatgcctggaagcctacttccgccagtccgaacagctgccaacccgcctgttcatccgcaccggcgaagcggaaggcaacgccgcggcggccggtatgctgctgcaggtgctgccggcgcaggacggcaacctcgatgatttcgatcatctggtgcaactgaccaacacggtcaaaagcgaagagctgttcggcctgccggccaacgaagtgttgtaccgcctgtaccatcaggaagaggtcaccttgtacgaaccacaggacgtgcagttccgctgcacctgttctcgccagcgttgcgccgacgcgctgctgaccctgccgaccgacgaagtggcggacatgctggagcaggacggcaatatcgacatgcactgcgactactgtggcagccactatgtctttgacccggttgatgttgccgcgctgtatgcgggtaacaccggcgaaagcgaccagttgcactaagttacaccctttcggcgggcgcgcccggcgcccgccaacgcccgccgtttgcacgtttgcttttttccgtgtgctatctctcagatcgtaacgaaataccgcctaaaacgttaaatatttgatacccatcgcggttacgcaccgttagatccctacaattgccgccagaaattctgtgaccaaggagtagtaacatgcgcgttaaaggtataacccctcaggatctggccgcttacggcattcacgacgttagcgaaatcgttcacaacccgagctatgaactgctgtttaaggaagaaacagacccatctctggaaggttttgagcgtggggtagtcaccaagctgggtgccgtctccgtcgataccggcatcttcaccggccgttcgccgaaagacaaatacatcgtccgcgacgacatcacccgcgataccgtgtggtgggccgatcagggcaaaggcaagaacgacaacaaacccctcagcccggaagtgtgggccgatctgaaacacctggtcaccgagcaactgtccggcaagcgcctgttcgtggtggataccttctgcggcgccaacgccgactcgcgcctgaaagtgcgcttcatcaccgaggtggcctggcaggcgcacttcgtgaaaaacatgtttatccgcccgagcgacgaagagctggctgacttcgaaccggacttcgtggtgatgaacggcgccaaatgcaccaacccgaactggcagcagcaaggcctgaactcggagaacttcgtcgccttcaacctgaccgagcgcatgcagctgatcggcggcacctggtacggcggcgaaatgaagaaaggcatgttctcgatgatgaactacctgctgccgctgaaaggcatcgcctcgatgcactgctcggccaacgtgggcgagaaaggcgacgtggcggtgttcttcggcctgtccggcaccggcaagaccaccctctccaccgatcccaagcgtcagctgatcggcgatgacgagcacggctgggacgacgacggcgtgttcaacttcgaaggcggctgctacgccaagaccatcaagctgtctgaagaagccgagccggacatctaccacgccatcaaacgcgatgcgctgctggaaaacgtcaccgtgctggccgacggcagcatcgacttcaatgacggttcgaaaaccgaaaacacccgcgtttcttacccgatctatcatatccagaacatcgtcaagccggtgtccaaggcgggtcacgccaccaaggtgatcttcctgaccgccgacgctttcggcgtgctgccgccggtatcgcgtctgaccgccaaccagactcagtaccacttcctgtccggcttcaccgccaaactggccggcaccgagcgcggcgtaaccgaaccgacgccaaccttctccgcctgcttcggtgccgcgttcctgtcgctgcacccgacgcagtacgccgaagtgctggtgaaacgcatgcaggccgccggtgcccaggcttacctggtcaacaccggctggaacggcaccggcaaacgcatctcgatcaaagatacgcgcggcatcatcgacgccatcctgagcggtgagatcgacaaggcggaaaccgtcactctgccgatcttcgatctggcgatgccgaccgcgctgccgggcgtgaatccggagatcctcgatccgcgcaatacctacgccagcctcgagcagtggcaggaaaaagcgcaggatctggccgagcgcttcatcaccaacttcgacaaatacaccgacacgcctgcaggcgccgcgctggtcagcgctggcccgaagctgtaattcggtagcattacctcttcagctaaggcgcggatcccgcgcctttttttattttttcgtgattgctttttgaccagtgagacgagaaaataagtcaatgcaatcattgatagcaaaggaggtttaaatggcgactatcaccgtcagaaatctggacgacgaaatcaaagaactgctgcgtatttcagcggcgaaaaacggccactccatggaagaggaagcgcgcatgatcctgaagcaggcgctggtgaaaaagccgccgcgctatgggttaggaacacgcatgcatcagtacttcgccgaattcggcggcgttgagttggagatccccccacgtgatgaggcccctcatcgtatcgtcaactttgatgaagatgatgaaaaatgattgtgctggataccaacgtcgtttcggaattgctgcggccggcgcctcactacaatgtattgcgctggttagatgagcaggatacgtatcggttctatttgagcgccatcgtggttgcggagttgtatacgggcatcgcctgcatgcctcacggcaagaaacagctcgaactgcaaactaacctcggcgacatgctgcaggaagagttttcagacagaatcttaccctttgacgtcggctgtgcgatgcagcatgcggaattaatgggcgccaatcgccgccgaggcattggcgtcagcatgccggatacccaaatcgccgccacctgcctgcattacggcgccgccctggccacccgcaataccaaagacttcctccactgcggcatcgagttaatcgatccgtggcaggcgccgaccggccgtcggttgcatgaagatgcggcggaatactacgtgatgagcagaaagtcctgacggggccgcagcggcgcggcccacaccagaggtcaggcgttttccctggccgtttgatggccgttggtcgactcttttttctccatcggcaacggaatatacgcgcggatcaacagcccgccgcgctcgctggtgccgatatccagttcgccgtcatgcgcgtcgataatgcgctgcacgatcgccagccccagaccggtgccgctggtgctgcgcgcgctgtcaccgcgtacgaacggctgcaacaggtgcttcaactcttccggtttgatgcccggaccgtcatcttccacctggaaccaaccgcgctgcagctcacggccgctgctgaccttgatccagccgttgccgtaacgcgccgcgttcaccaccatattcaccgccgcccgcttaatcgacagcggatgcacattcatcatcagctcgcccggcgacagcgcggtttcaatcacccgctcatagccgctctcggccgcgaccacttcgcctaaaatggcgttcagatcgctgctttcggtcggcatttcctgcccggtgcgcagataatcgatgaactgctcgatgatggcgttgcactcttcgatgtctttattgatcgactcggccagatagccgtcttcggcgctcatcatctccgtcgccagccggatgcgcgtcaacggcgtgcgcaggtcgtggctgaccccggccatcagcaacgtgcggtcatccgccagctgcttgacgcccgacgccatctgattgaatgcgcgagtcaccgaccgcacttcggaagcgccatactcgcgcagcggcggcggaataatgcccttgcccacctgcagcgccgcatgttccagctccaccagcgggcggttttgaatacgaataaacagccaggcgccgccgatcgccagcagcatgatcgccagcgtatagcggaacagcggtgagaagtcgccctggtggatttccgtcagcggcacgcgcacccagatatcgggctgcagccaggttttcagccacaccaccggggagttcttgttcacctccacccgcacatcggttggcccgccgagctgctgcgccatctgctggctgaggaactggtagtgctgcgcccagcgcaggccgctctcctccgccgccgagttggtgtagagagagatgcccagttcacggtagatctcacggcggaacgccggcggcacttccagcaacgtgccatcttccagctgcagccgatcggtcatcagcatacgcacttcgtaggccaatactttgttgaactgctgcaggctgggcaggatggcgaagttcagcaccaccagataggtcgtcaccaggctgacgaacagcaaggtgacgatcaacaacagggttcgggcaaacgagctacgcggtgaaaagcgcaatcgcctcatgccttgctgccgtccggtacgaagacatagccgagaccccacacggtctggatataacgcggatgcgccggatcttcttcaaccatgcggcgcaggcgagagatctgcacgtcgatggaacgctccatggcgctgtattcgcggccacgcgccaggttcatcagcttatcgcgcgacagcggttcacgcgggtggctgaccagcgccttcagtaccgcgaactcgccgctggtcaacggcatcggctcgtcttcgcggaacatctcacgggtgccgaggttcagtttgaatttgccgaacgcgatcaccgcctcttcctgcgaaggcgcgcccggcagttcgttcgcctgacggcgcagcaccgcgcggatacgagccaacagctcacgcgggttgaacggtttaggaatgtagtcgtcggcgccgatttccagccccacgatgcgatcgacctcttcgcctttggcggtgaccataatgattggcatcgggttgctctggctgcgcaggcggcggcagatggacaggccgtcttcacccggcaacatcagatcgagcaccatcaaatggaaggattcacgagtcagcaagcgatccatttgctcagcgttggcaacgctgcgaacctggaagccctgctcggttaaataacgttctaaaagcgcgcgcaggcgcatgtcatcatcgacaaccaggatcttatgattctcttgcatggtattactcccaaaggctttattgcctgactcgaatattgttagaaaaccttgccatttgagacagcgtttaatggtatgtattctagacgaaattgttacaaagcttattcttttccccatttatcaacaattttcagtgaatgtcgacgggggttcgttaaaatttcgccctttatcggcgcaatgtggggtgacggcccaattttgcacaatttcgccaccggcgaaccgaccggtggcgttcagctgtcgggtcaggaagtctgcaggaaacgcgccagctgccggcgcaactgccggttctcttgctgtagggcgtcaacccggtcgagcagcgttagcgccatggcgatccccggccaatccagatccagctcggcccgcagcctgcgcgcgcgctgcaggtggctcagcgccggataatcgaactcccagcgcggctgcgccggctccagcggcacgataacgcccaggccgacgatctcgaccaattcatcctctgaaatctccaccctctgacacaattccaccacggtgaaagtgatctcttttttcatcatgtgctttactcccattccgcgcgcgggttgaacgccgcctgttcagccagttcccgccacagggcgctggccttctcgttcggcttcggcggcatcaccaccttgagaatgacatacagatcgccgggctctttcttgcccgccagccctttgcccttgacccgcagccgtttgccgctctggctgccggccggcacggtcagcgcgattttgccggtcagcgtcggcacctcaatgctggcgccgagcgccgcttcccacggagcgagcggcgccacgatgctcaggttgtggccgtcgatctcgaacagcggatgcggcgcaaggcggatgaccagatacaggtcgccgttctggccgccgcccacgccggcaacgccctgccccttgaggcgaatgcgctcgccgtcgcccacgccggccggaattttcacgttcagcgtcttgctggcttcgcttacctgccgccccagttcgtcgtacaccggcagcgtgtaggaaatctcgcggctttgaccatgcagcgtttcctcgaggaacagcggcacctccatctccagatcctggccgcggaagccatgcccgccgtgcgagtgcgaagcagagcgatgcccgcccgccgcccgcccgccgaacatgctttcgaagaaatcggagaagtcttgcgcgtcggcgccgccgccgtgccatgaagcgctctgctgatagccgccgcgatcgccgcgcgcctggcggccaaagttcggatcgttgcggtgcagccggatctgatcgtactcggcgcggcgctcctcgtccttcagcacctcataggcttcggccacttccttgaacttgctttcggcatcgtcttcagtgctcacgtcagggtgatatttacgcgccagccgacggtaggccgttttgatggttttcagatcggcgttgggctcaacgcccatcgtggcgtagtaatctttaaattccatgcggtaataccttcaatgtgttgggttgtgcgccaaaattccttgtctctctcgccagatatcctcctttcgtcacattccttttccgctacgctaagcatactcccgatcgttaaaagctgcgcaaactgaataaaaaccgtgcgacaaggcacaggcccgcgcgccatttctaaagccccccgcattcacgtacactgtggcggtggccccataaagataaatcacgatgagaactcaactgataacccgtgaagggtatgacaagctcaaacaagagctggattacctctggcgcgaagaacgccccgaggtgaccaagaaagtgacctgggccgccagcctgggcgacagaagcgaaaacgccgactaccaatacaacaagaagcggctgcgcgagatcgatcgccgcgtccgctatctgaccaaatgcctggagcagttgaagatcgtcgattattcaccgcagcaggaaggcaaagtgttcttcggcgcctgggtagaggtggagaacgaagacggcgaaaccaaacgctttcgcatcgtcggttacgacgagattttcggccgcaaggattacatctccatcgatgcgccgatggcgcgcgccctgctgaaaaaagaggtcggggacgtcgccaccgtcaataccccgctgggcgaggcgcagtggtacgtgaacgagataaactacccgaagtaagctttcagctttttcctaaccgccgccaacgccgccgtctgcgctgttctccatgccgcggccgcgcggcggcggcccgcttcgctggcattttccccgatcaatccgtataactgtcccctgtttattcaccgatctcaatacagataccagacctatgaatgacccactgagccgcattattgcaacagaactgcaggcccggccggagcaagtcgactccgccatccgtctgctggatgaaggtaataccgtgccctttattgcacgctatcgtaaggaagtcaccgggggcctggacgacacccaactgcgccagctggaaacccgcctgggttatctgcgtgaactggaagatcgtcgccagaccatcctgaagtcgatcgatgaacagggcaaactgactgaacaattggcgggggcgatcaacgccacgctgagcaagaccgaactcgaagacctctacctgccgtacaaaccgaagcgccgcacccgtggccagatcgccatcgaagccggcctggaaccgctggcggatacgctgtggcaggatccgcaacagcagccggaacaactggctgaacgctacgtcgacgccgacaagggcgtggcggacgtgaaagccgccctcgacggcgcgcgctatatcctgatggagcgcttcgccgaagacgccgcgctgctggccaaggtgcgcgactacctgtggaaaaacgcccatctggtgtccaaagtggtcgaaggcaaggaagaagaaggcgccaagttccgcgactattttgatcaccacgaaccgatttctcaggtgccttcacaccgcgcgctggcgatgttccgcggccgcaacgaaggcgtgctgcagctggcgctgaacgccgatccgcagtttgaggaagccccgcgcgaaagccaggcggagctgatcatcatcaatcacctcaacctgcgcctgaacaacgccccggccgacgcctggcgcaaggcggtggttaactggacctggcgcatcaaggtgttgctgcacctggaaactgagctgatgggcacggtgcgcgagcgcgcggaagatgaagcaatcaacgttttcgcccgcaacatgcatgatctgctgatggccgcgccggccggcatgcgcgccaccatgggcctcgatccgggcctgcgcaccggggtgaaagtcgccgtggtcgacgcgaccggcaaactggtcgccaccgacaccgtctacccgcacaccgggcaagcggcgaaagccgccgccatcgtcgcggcgctgtgcatcaaacacaacgtggagctggtggccatcggcaacggcaccgcttcacgtgaaaccgagcgcttctatctcgacctgcaaaagcagttcggcgaagtccgggcgcaaaaagtgatcgtcagcgaagcgggcgcgtcggtgtattccgcgtctgaactggcggcgcaggaattcccggatctcgacgtatcgctgcgcggcgcggtgtccatcgctcgccgcctgcaggatccgctggcggagctggtgaagatcgacccgaaatccatcggcgtcggccagtatcagcacgacgtcagccagagccagctggcgaagaaactggactcggtggtggaagactgcgtaaacgccgtcggcgtcgatctgaacaccgcgtcggtgccgttgctgacccgcgtggccggcctgacgcgcatgatggcgcagaacatcgtcaactggcgcgacgagaacggccgcttcagcaaccgtgaacagctgctgaaggtcagccgtctggggccgaaggccttcgaacagtgcgccggcttcctgcgcatcaaccacggcgacaacccgctggatgcttctaccgttcacccggaagcctatccggtggtgcaacgcatcctggccgccaccgagcaggcgctgcaggatctgatgggcaacgcctccgcagtgcgcagcctgaaagcggttgatttcaccgacgacaagttcggcgtgccgacggtcaccgacattctgaaagagctggagaagccgggccgtgacccgcgtccggaattcaaaaccgccaccttcgccgaaggcgtggaaaccctcaacgatctgcagccgggcatgatcctggaaggctcggtgaccaacgtcaccaacttcggcgccttcgtggatatcggcgtgcatcaggacggcctggtgcacatctcctcgctggcggacaaattcgtcgaagatccgcacaccgtggtgaaagccggcgacatcgtcaaagtgaaggtgatggaagtcgatctgcagcgtaaacgcattgcgctgagcatgcgcctggatgagcaaccgggcgagggttcaccgcgtcgcggcggcaacgcgcctgcccagacgcgcgacaacaccaaccgttcggcaggcggcaacaaggccaaaccgcgcaacgcggtgccggccggcaacagcgccatgggcgacgcgctggcggcggcattcggcaagaaacgctaagtcggaaccgacagggcggagcctgctccgccctttccgagaaagaaaacttgcggcatttttttgacccgtctcaataaaccttcatctttttatttcccgttgctgcgtgaccgccctcccattgttaaagcggcaaacattccttctgcagccgtttattaacaacgtcgttaacacgcatttttcattttgcgaattgtgagcgaaacacaaatggttaccgctcgcattacggcggaataatgttattgaattgcctttcatcagaaataaataagggaaaaacgccatcaatatttgcaaacgagaaaactcggctacaaatacgcaactgatttaactcaccattctcatttgtcgccgagtaaaagcagtggtaaaacggggcttatcaagacgacacaaccaaaaactgtcgacgccataataattggttacaatacccctatcttttgtgttgaatgcgataatgataattactattatttgcgctcactttattgcatgaccttatggatgaataccgccgacggcgtggcattttcgccggcaacgtccaattatcatcagcccgatgttcatcggcacccggaaggttaatcacatgcagcttcaacctaaacacacatataagattgtcggcttttccggtgaaattgcaccggcctaccgccagaaactgttatcgctcggcatgctgcccggctcttcgttcgacgtggtgcgcgtcgcgccgctgggcgatccgatagaaattaaaacccgccgcgtcagcctggtgctgcgcaggaaggatctggcgctgctgcagctcgacggccagtcctgaaccggcgcgcctccatttgccgacgcgcccttgcgccggcgctgctctccttgaagacgacacgcagaactatgaaaaaactcaccatcggcttaatcggtaacccgaactccggcaaaaccacgctgttcaaccagctgaccggcgcacgccaacgggtcggcaactgggcgggcgtgacggtcgaacgcaaagaaggccatttctctaccccgcagtccgacgtgcggctggtcgatttgcccggcacctactccctgaccaccatttcagagcaaacctcgctcgatgagcagatcgcctgccactacattttgagcggcgacgccgatctgctgatcaacgtggtcgatgcctccaacctggagcgcaatctctacctgacgctgcagctgctggagctgggcattccctgcatcgtggcgctgaacatgctcgacatcgccaaaagccagcatatcgatatcgacgtcgccgcgctgtcggcgcgcctcggctgcccggtagtgccgatgatctccacccgcgccgacggcatcggcgtgctgaaacagatgatcgacaatcatcgcatcaacgaacagcaggcgctggtgaactacccgccgttgctgttgaaagcggtcgccacgctgagcgatgccatgccgcaaacgctgccggcggtgcaacgccgctggctggcattgcagatgctggaaggcgacatctacagccaccggctggccggtcccgccgtcgcgctgctgcctgcggccattcaggcgttgcaacagcagcagcaagaagacccggcgctggtgatcgccgacgcgcgctaccagtctatcgccaccctgagcgacgcggtcagcaactcgcagcaggcgatgcccaaccgcctgaccgacatgctggataaagtgatcctcaaccgctggctgggcgtaccgatcttcctgttggtgatgtacctgatgttcctgctggcgatcaacatcggcggcgcgctgcagccgatcttcgacatcggctcggcggcgatcttcattcagggcattcagtggctcggctacaccctgcacttccccgactggctgaccgttttcctggcgcagggcgtcggcggcggcatcaacaccgtgctgccgctggtgccgcagatcggcatgatgtacctgttcctgtcgttcctggaagactccggctacatggcgcgtgcggcgttcgtgatggatcgcctgatgcaggcgctcgggctgccgggcaaatcctttgtgccgctgatcgtcggtttcggctgcaacgtgccgtccatcatgggcgcccgcacgctggacgcccaacgtgagcgcctgatcaccatcatgatggcgccgttcatgtcctgcggcgcccggctggcgatcttcgcggtgtttgccgccgccttctttggccaggacggcgcaggggtggtgttctcgctgtacatgctcggcatcgcggtggcgatcctcaccggcctggtactcaaatacaccctcatgcgcggcgaagcctcgccgttcgtgatggagctgccggtttaccacgtgccgcacctgaaaagcctgctgctgcaaacctggcagcggttgaaaggcttcgtgttgcgcgccggtaaggtgatcgtggtggccagcatattcatcggcggcctgaacagcttctcgttcagcggcaaaacggtcgacaacatcaacgactccgcgctggccacggtttccaaggtgctgacgccgttgctgcagccgatgggcgtccaccgcgataactggcaggccaccgtcggcctggtgaccggcgcgatggcgaaagaagtggtggtcggcacgctgaatacgctgtataccgccgagcacatcaacaaagaggcgttcgacgccgccaacttcaacctgctcgatgagctgggcggcgcgctgcaggaaacctgggacggcctgaaaaacaccttcagcctgagcgtgctgtccaacccgatcgaagccagcaagggcgacggcgagatgggcgtcggctcgatgggcgtgatgagcagcaaattcggctcgggcatctccgcctacagctatctgatcttcgtgctgctgtatgtgccctgcgtctcggtgatgggcgccatcgcccgcgaatcgagccgcggctggatgacattctccatcctgtgggggctgaacgtggcctactcgctggcgacgctgttctaccaagcggcgaccttcaaccaacatccgcagtacagcctgacggcgatcctggcggtgctgctggtgaatctgctggtgctgttcggcctgcgccgggcgcgcagccgcgtcacggttcgcctgggcaacgccacgccggcggcctgttgtcagggcgccaaagggagctgtcactgatggccgggctgctgcagttgcgcgatgcgctggcgctgcgcggcagtgcccaggcgcagcagctcagccaatcgctggcgacgccgctgccgctggtgcaggcgatgctggatcgtttgacggcgatggggaaagtggagcgcatcgaacaggatgacggcgcctgtttgagcggcggctgcaaaagctgcccgcagggccaggggtgcagcacggtgttctaccgactgaaagcctgaagataaggggcgccaatgacgggcgccccattaccgttcaaggcttattgtttgtctttgtaaacttcggcgatggcgctgaatttaccgtgttcgcggcctgccaggatcacgtagtattgaccgcccttttcgtcagccagtttggacagctcttccttggcgtccatcggtgacgtggtttccgccgtcgtggtgacggtgccgatcttctcgtatttacccgggttcttatccagatcttccttggtcagcagggttgccgccatggagccgaaagacaccgaacccagcactgccgctgcaataatcatcttcaatgatttcatgacactaacctctcaatggataatttatctgttatgaaagccgtcaaaaatccatgcgtagtaccgcaggctgccgcgacatcctcaggcctcgttgctttccctgacggggcccgtttcccagagacgaaacgccaaaatgaaaatcgccgcacgcggtcttttcattttgcagccaacgcattgactcactaagtattgaacagctttgtcttttatccacccggcagcgttttttttcgcgctctatcgtgcgttttcccgctgcattcaatgtgctgcaataaacgcttcgatcatcgtcacaaattcatcgggatgagagataaacggcgcatgggcggctttggccacgatctgcgacgtggagttcggccaggcggcatcgagcagctcggcgaccttgcgcggcactaacccgtccagatagccgtaaatccgcagcagcggcagattcaactccgccagcggcgcgcgcagatcggcggtgcgcaggatctccagcccgccgttcaacacctcgacgctcggcgtcggctggttgagcaccaccgctttcagctggcgcgcatcctgacgcgcgctctcggtgcccagcgtttgcagcgccagaaaacgctcgacggtgcgctggaaatccaggctcagctgatgctggaaaccgctcagcacatccggacggatccccggccacgcatcgcgggcggcaaagcacggcgaggaggccacggtgataagccccttgacccgcccgggctgcatcagcgccgcctggctggccaccagcccgccgagcgaccagccaagccaccaggcctgcggcggggcggccgccagcacgatatccgtcatctgctccagcgacagggcgccgaacccctggctgcggccgtatcccggcagatcgaccagatgcaggcgaaaatgcggcgtcagtcgcgcctggatgcatctccacacttcggcgttcaatccccagccgtgcagcagcacaagatcgcgttcgccttcgcctattgtttgccagtacagcgctgtcattggttactgtcctttcatgcttatccgtgtcggaggccctatgctatcaatccgcagccgctgttggctatgccgacagccgttgagcctggtgcgtcatggcatctgcagttgctgcctgcgccatctgccggtcaaccctccgtgttgcccgcgctgcggattgcccgccggcgagacgcaaatgccctgcggccgctgcctgcaacggccgccgccctggcagcggctggtgttcgtcggcgactacgttgcgccgctcagccaactggtaaaaagattcaagttccaccgcgcgcccgagctggcgccgacgctggcgcgcctgatgctgctgcggtggcagcaggcgcgaagagagcagtatctgaacagacccgacctgattttagcggtacccttgcatgcatcacgctgctggcaccgtggctataatcagagcgatctgctggcccggccgctggcgcgctggctgggctgcgcctatcggcccgccgccttgcgccgggtgcgcaaaaccgccctgcaacagcggctgagcgcccctgcccgcagacgcaatctgcagcgcgcgttcgcctgtaccgtgccggtcgccggccggcatatcgccctggtggatgacgtggtgaccaccggcagcaccgtcgcggcgatcgcggcgctgctgcggcggcaaggcgccgcttcggtgcagatatggtgcgtttgccgcacgttgtagtgccacggcaatgggcgtattataaccgactatagaagtcaactattgagctaatgctatgatccgtataacagatgctgcacaggaacactttgccaaactgctggcaaatcaagaagaaggcacccaaatccgcgtattcgtgatcaacccgggcacgccgacggccgaatgcggtgtctcttattgcccgccggacgcggtagaagcgacggataccgaactgaagttcgacaaactgtccgcctatgttgatgagctgagcgcgccgtatctggaagacgccgaaatcgacttcgtgaccgaccagctgggttctcagctgacgctgaaggcgccgaacgccaagatgcgcaaggtcgatgacgacgcaccgctgatggaacgcgtggaatacgtgctgcagtcgcagatcaacccgcagctggcgggccacggcggccgcgtaacgctgatggagatcaccgacgacaacatggctattctgcagttcggcggcggttgcaacggctgttcgatggtggacgtcacgctgaaagaaggcatcgagaaagagctgctgcagaaattcccggagctgaagggcgtgcgtgacctgaccgagcaccagcgcggcgagcactcttactattgatacccggcgttcgcgccacggtagataacacaatgccggaagggggaacccgttccggcattgtcgttttcagcccaccgacaccttgcggcgccgcttgtccaaatccttcagtaagcggtttatgtgcgggtcggcaaacatctcctccagcgtctgggtcagcttgcgccgccagttagggtactgatcgctggtgccgggaatgttgaccggatccgccatatccagccagtcttccggctgcaggccgagcagagcgctggcgctgtcggcgacatagcgctgcaggccgcggttgagcagcgggctcatgccgagcagcgccgccttcttgcccaccttctgcggcacgcagccatagcgatgcaatccgtccagcaacccctgtttggcgcgttcccgatcggcgaacagcgcctgcaggatctccgcatccgggtaaaggcccagccgattgccgagcgtcagatcgtcgctttgccaatagccgcgcagcgtcggcagatcgtgggtggtgatggtcgccatcgcctgcaccggataggcctgcggcgcgcggaaatggtgctcgccgtcgctttcgaaatagagcactttgtaggagtagacgccgctgtcgcgcagcttgccgacgatctccaccggcaccgtgccgagatcctcgccgatcaccatgcaacggtggcgctggctttccagcgccagcaccgccagcagatcgtccaccgggtatttgacataggcgccgcgatcggcggtttcgccatacgggatccaccacagccgcagcagcgccatgacgtgatcgatgcgcagcgcgccgcagctggtcatgttggcgcgcaaaagatcgatgaacggctgatacccgcgcgctgccatcacgtgcggatccatcggcggcaggccccagttttgccccagcggccccagaatatccggcggtgccccgaccgacgctctcaggcagtacagctcacggtcacaccaggtttccgccccgccttccgccaccccgaccgccagatcgcgatacaggccaatcggcatctgctgctgcctgctctggtcaaaacactgtgcgaactgcgtggccgccagccattgcagccacaggtaaaagcggaccgcgtcctgatgttcggcgcagaactgccgcaccgcatcgctctgcccctgccgatagcgctcgggccaggccggccagccccactggctggcgtctttggccgccagatgggcatgcagcgcatcaaacgccgcctgctgatacaggctgtcgcccccctcagccacgaactgctcgaacgccagacgctgcgcgtcgttcagctggcgcgcctgaaacagcgggaacgccagcttcagcgccgccagcttcagctgcatcacggcggtgtagtccacccactccgcggcgcgcgccttggccagctgcttctgcgtcgccggcttctgccaccagcgctgcgccgcgtcgctgcgctggaaatcctccaccgcattgacgtcgatatacgccagattcagccagcggcgcgacgaggggctgtaggggctggcgctctccgggttggccggatacagcgcatggatcggattgaggccgacgaaggcaccgccgcgttcccccacctgctccaccatcaggcgcagatcgccgaaatcgccgatgccccagttgcgatcggaacgcagcgtatacagctgaacgcaggccccccacagcttcttgccggtcagcaaggcgtccggctcgaagcagcgtctcggcgcgacgatcactcggcatgaccactgctgctcgccctggctcagcgtcaattggtggtaccccatcggcagatcgccgggcagcgtcagggtcttgcgcgcgccgacgcgcccctgcaggcattcgccgtcttcacgctgcagcgcccacaggtactcgccttcacccgccggggtcaacgccagcggcgcgccctgatagaacaccttgaccgccggtaacggtgatgccgcgccttcctgcgcgccatcggcccgattcatggccgccaacagcttgcgcttggtctccggttcaatcgcctgccgcttgccgtgggcattgataaaatcggcagcgatccccgcctgcgctgccgcctgatcgatacgcttgcgatccattcgctctccttaacgtttggcttgccagatacgctgctgataatcgcggatcgagcgatccgagctgaacatgccgacgcgcgcggtgttaaggatagtccgccgcgtccattcgtcccgatcgcgatacagctcgtcgacccggcgctgcgcctggcagtacgaggcaaagtccgccagcaccaggtagggatcgccgccttccagcaggctgtgcagcatcatgtcgaacgcatgcttgtcgccgtggctgaaggcaccgctcgccagctcgtccagaatcgccttcaggtgcttgtctttcttgcggtagctgagcggatcgtaacccttcgccactatcgccttcacctgctccacggtattgccgaagataaagatattgtcttcgcccacctgctcggcgatttcgacgttggcgccgtccagcgtgccgacagtcagcgcgccgttcaacgccagcttcatgttgccggtgccggaagcctctttgccggcggtggagatctgttcggagatatccgccgccgggatcatcaattcggctaccgacacacggtagtcagggatgaacgccactttcaggcgatccttcaccagcggatcgttgttgatcttctcggccgcctggttaatggcgtagatgatgttcttcgccaggtagtaacccggcgccgccttggcgccgaacaggaacacgcgcggcacgatgtccaggttcgggttgtcgcgcagctggcgatacagcgacaggatatgcagcaggttcaggtgctggcgtttgtactcgtgcaggcgtttgatctgcacgtcgaagatcgcgtccgggtcgagcgtcaaccccatcacgccgtgcacgtactgggccagcgccaccttgttgtcgcgtttgatctgctgataacgctggcggaacgccgcgtcgtcagcgaatttctccagcccgcgcagcgcgtcgagatcgttcgcccactccaccttcagcgtctcatcgatcaggcccgacagcgccgggttgcactgtttcagccagcggcgcggcgtgatgccgttggtgacgttatggaatttattcggccatagctggtggtattccgggaacagatctttcaccaccagatccgaatgcagctgcgccacgccgttgaccgcaaagccgctgaccacgcacaggttggccatgcgcacctgcttgtcatggtgtacagccagtttggcccacaccgcctcgtcgcccggccagtgcttatccaccaattttttaaacctggcgttgatctgtttgatgatggagaaatggcgcggcagcaggctgcgcaccaatttttcatcccagcattccagcgcttccggcatcagggtgtggttggtataggcgaaggtgttgctggtgatcgcccaggccgcctcccactccaactggtgctcgtccagcagaatgcgcagcatttccggaatcgcgatggtcgggtgggtgtcgttcagctggatcacttcgtacttcggcagctcttcaatcttgcggccggcctgatggtgcttgcgcaaaatgtccgccaccgagcaggcgcactggaaatactgctgcatcaggcgcaggcgcttgccggcctgatggttgtcgttcgggtaaagcaccttggtcagcttgtcggcttctacgccctgcttctccgcctgcaggaacttgccgtcgttgaaatcgctcaggttgaacggatgctgatgggtcgcctgccacaggcgcagcggctgcgccacgccgttgcgataccccagcaccggcaaatcccaggcttcgccgcgcagggtgaaggcggggcgccacagttcgcggccgtcggcctgcttttccagcttgccgccgatgcccacgtccaccgccagcgcggcgttgtgacggaaccacggatagctctcgcgctgccagttatccggcgcctcttgctgctgcccatcgcggaacgactggcggaacagcccatactgataattcagcccatagccggtggccggttgttctaccgtcgccatcgagtcgaggaaacaggccgccagccgccccaacccgccgttgcccagcgccggatcggtttcctgttccagcaggtccgccagcttgacgttttgctcggccagcgcctgctcgacggtgtcgtaccagcccaggttgatcaggttgttcgccgtcagccggccgatcagaaactccatcgagatgtagtttacgtggcgcagcggtttggcgcttttgcgcggcgccggctgcgcggccaactgctcggccagcgccgcactgacggcttcccaccattgatgttgcgtcatctgctgtgcggaactgaggccgaaccgttgccattgacgggtgagcgccgccagaaaagcatccttcttaagcgtaggctgtgacataaggaaaactctctatccagtaagtgggtcaaattgccgctatcgtgccggtgagaaagcctgacggcatcatcccgcctggggattagctggggaggaggattggggcgtagctggaattgtgatctcaggcactgtttgactcccttgcaacgatgcaaaaaagcccgccaacgcgtgcggcgagcactgagaacgttaaccctgacgttagcacaagtattcgcgctgctgaagttttgtccatggccggaaatgcgatccgccaccgcatcgccgcacgccggcgccaaacgtaaaaaagtgtgatcgatagcaacttaactccaagccgatgcggaagcttgttgcaatacgtttagggttggcagaagttagggggagctattaattacgaaccataaaataattagcgccactccaatcccggcgggaaccgcgatttataccctggaatactatgctgatcccatcaaaactgagccgcccggtacggctgcaaaataccgtgatccgcgatcgcctgctggccaaactggccagcgcgggcaactatcgtctgacactggtcaattgcccggcgggatacgggaaaaccacgctgatcgcccaatgggcggccggcaaggccgatctgggctggtattccctggatgagagcgacaaccagccggagcgtttcgccagctacctgatcgcggcgctgcagcaggccagcggcggccgctgcgtcaagagcgaggcgctgagccagaaacaccagtacgccagcctgtcggcgctgttcgcccagctgtttatcgagctggccgactggcatcaaccgctgtacctggtgatcgacgactatcacctgatcaccaacgacgccatccatgaagccatgcgctttttcctgcgccatcagccggaaaacctgacgctgatcctgctctcgcgcactctgccgccgctcggcatcgccaacctgcgggtgcgcgatcagctgctggaaatgggcacgcagcagctggcgttcacccatcaggaagccaaacagttcttcgattgccgcctggcggcgccgatggaacagcaggacagcagccgcctgtgcgacgaagtcgaaggctgggccaccgcgctgcagctgatcgcgctgtcggcccgccaatccgcctcatcggctcagctgtcggccaagcggctggcggggctgaacgccagtcacctgtccgactatctggtggacgaagtgctggaccacgtcgatggcgatgcgcgcgccttcctgctgcgctgttcggtgctgcgctcaatgaacgatgcgctgatcgtgcggctgaccggcgaagacaacggccagcagcggctggaggagctggagcgccaggggctgtttatccaccgcatggacgacaccggcgaatggttcaacttccatccgctgttcgcctctttcctgcgccagcgttgccagtgggagctggcgctggagctaccggggctgcaccgcgccgccgccgaaggctggctggcgctggggtatccggcggaggccattcaccacgcgctggcggccagcgacgtcagcatgctgcgcgatatcctgctgcaacacgcctggtcgctgttccaccacagcgaactggccttgctggaggagtgcctcaacgcgctgccgtatgagcgcctgatccaaaaccccaagctggcgctgctgcaggcctggctggcgcagagccagcaccgctacagcgaagtcaacactctgctggagcgcgccgagcgcaccatgcgcgaacaaaaaatcgagatagaccaaacgctgcacgccgagtttgacgccttgcgcgcccaggtggcgatcaacgccggcaaaccggaagaagccgagcggctggcgagcgaagcgttgaaattcctgccgctgtcgagctattacagtcgcatcgtcgccacctcggtgaccggcgaagtgcaccactgcaagggcgaactggcgcgcgcgctgccgatgatgcagcagaccgagcagatggcgcgtcgtcatcaggccaaccattacgcgctctgggcgctgctgcagcagagcgaaatccttatcgcccaaggcttcctgcaggccgcttacgaaacccaggacaaggcgttcgaactgatccgcgagcagcacctggaacagctgccgatgcacgagttcctgctgcgcatccgcgcccagatcctgtggtcatggtcgcggctggacgaagcggaagacgcggcgcgcgccgggctgaaaatcctggctaactaccaaccgcagcagcagttgcagtgcatcgccatgctggccaaatgctcgctggcgcgcggcgatctggacaacgccaacacccacctgcagcgctgcgaaaccctgctgcacggcgcgcactatcatcgcgactggctgaccaacaccgacaaatcgcgggtgatccactggcagatgaccggcgacaccgccgccgccgcccagtggctgcgccacaccgaaaaacccggcatggcggacaaccacttcacgcagggccaatggcgcaacatcgcgcgggtgcagctcctgctcggccagtatgaagaggccggcgtggtgctggatgaactgaacgaaaacgcccgccgcttgcgactggtgagcgatctcaaccgcaacctgctgctcagcaaccagctctactggctgcaagagcgcaagggcgaagcgcagcaggcgctgatcgaagcgctgtcgctggccaaccgcaccggctttatcagccacttcgtcatcgaaggcgaagcgatggcgcagcagctgcgccagctgatccagctcaacacgctgccggagctggaacagcatcgcgcccagcgcatcctgcgcgacatcaaccagcatcatcggcacaagttcgcgcatttcgacgagaacttcgtcgataagctgctgacccatccgcaggtgccggaactgatccgcaccagcccgctgacccaacgcgaatggcaggtgctggggctgatctattccggttacagcaacgaccagatcgccggtgagttggatgtggcggccaccaccatcaagacgcacatccgcaacctgtatcagaaactgggcgtggctcatcgccaggaggcggtgcagcaggcgcagcaactgctgaaaatgatggggtacggcgcgtaaaaaccctgatatccctctggtcttaaacgccgcagagttggttacaatagcggcgtccccctattacgaggcagtcagcagtatggaacagttcgaagcgatcaacgttgagcaggcgtacacccgctggaaagagggcagcgccgccctggtcgacatccgcgatccgcaaagttttgaagccgggcatacgccgggcgcttttcacctcaccaacgccaccctgtcggcctttatgcagcaaaacgacttcgagcggccggtgatggtgatgtgctaccacggcaacagcagccgcagcgcggcgcagtacctgctgcaccaggggttcgacgcggtctacagcatcgacggcggcttcgaagcctgggcccgccagtatccgcaagacgtggaaacctctgcctgatccccgccgcccgccgtgcgtcggcgggcttccccttggtttttgtgcgcgttttcgcgggtttttcgcagatccgtttgccagcgctcaggatttcgacgttataatcggccgtcagggtcgccggcgagcaagccgcggccaaaatcattcacttacgacggaagagcaatggttagagtaatcgccatatccaacccgcgcctggcgctggcctttgtcgactatatggcgacccagggcatccggcttgagctgcgcaacagcggcgaggcggcggaaatctggctggccgacgacggtcacctcgagcaggtgcaacacgagctgcagcagtttctggccgatccgctcaaccgccgttatcaggccgccagctggcagaccggccataccgacgccggcctgcattatcagagcgaatcctacctgcacaccctgcgcagcaaggccgggccgctgacgctcggcgtgatggtgctgtgcatcgcggtctatattctgatgcaggcgctgggcgacgataccgtgatgtactggctctcctggccgcaggacagcagccaatacacccagctgtggcgctgggtcagccatgcgttcctgcatttctccctgctgcatatcctgtttaacctgatgtggtggtggtatctcggcggccagatggaaaaacgcctcggcgccggcaagctgttcgtgctggcggtggtgtcggccttcttcagcggctgggcgcaatcgttgttcagcggcgcgctgttcggcgggctgtcgggcgtggtttatgcgctgatgggctatgtgtggctgtcgggcgaacgggcgccggagcgcggcctgatgctgccgcgcggcctgatggtgttctcggtgctgtggctggtggccggatatttcgatattttaggaatgtcgatcgccaacgcggcacacatagccggtttagtgttagggttattgatggcattttgggatacgcgtcatcgcgcacacaacgaacaataacagccgggagctatgccccaatgggcatagcgggcgttttaggggattatcgtgaagcaaacacagcgtcatgacgcaattatcgagctggtgcgcctgcagggttacgtcagcacggaagagctggtcgaacattttgacgtcagcccgcaaacgattcgccgcgatttgaatgacctggcagaccagaacaagatccagcgtcaccacggcggtgcggcgctgccttccagctcggtcaacgctgcctataacgatcgcaaggtgatgtggtcggaagagaaggcccgcatcgcgcagcgcgtcgccagccagatcccggacggcgccacgctgttcatcgatatcggcaccacgccggaggcggtggctcatgcgctgatgaaccacaagaacctgcgcgtggtcaccaacaaccttaacgtcgccaccctgctgaccgccaaggaagacttccgcctgatcctggccggcggcgaagtgcgcacccgcgacggcggcatcatgggcgaagccacgctggacttcatctcccaattccgtctcgattacggcattctcggcatcagcggcatcgatatggacggctcgctgctcgaattcgactatcacgaagtgcgcaccaaacgcgcgattatcgaaaattcccgctgcgtgatgctggtgaccgaccattccaaattcggccgcaacgccatggtcaacctgggcaacatgaacctgatcgactacctgtttaccgaccaactgccgccgccgagcgtgatgaaaatcatcgaacagtacgacgtgcagctggagctgtgctgatccggccttaacctgcggggcgcgccgccgccccgtttcatcccttcagactcccctcaccgacagccgtttgcgcgcccgcgccatatccacactatttatgtgactatcatcaccaaactgttacctctatcacgcctaaatgtttttgtttggttaactcttggcttgcttgttggtttttgattacaatcatgagcgaaaacgaacatgaaagagctatttcgaacatctggaggaagatgacgtggaaaccaaagacttgatcgttatcggtggcggcatcaacggtgccggcatcgcggcggatgctgccgggcgcgggctgtcggtactgctactggaagcgcaagacttggcctgtgctacgtcttccgccagttccaaactgatccacggtggcctgcgctacctggaacactacgaattccgtctggtgagcgaagcgctggccgaacgtgaagtgctgctgaaactggcgccacacatcgcgttcccgatgcgtttccgcctgccgcaccagccgcacctgcgtccggcctggatgatccgcatcggcctgttcctgtacgatcacctgggcaaacgcaccagcctgccgggcagcaagggtttgcgctttggaccagagtcggtgctgaagcctgaactgaagcgcggtttcgaatattccgactgctgggtcgacgatgctcgcctggtggtgctgaacgcgcaggaagtggaaaaacgcggcggcgaagtgcgcacccgcaccaaagtgacccgcgcatggcgtgaaaacggcctgtggatggtggaagcggtcgatatcgacagcggcaaaaccttcacctggcgcgccaaaggcctggtgaacgccaccggcccgtgggtgaaaaacttcttcgacgacggcctgaagctgaaatcgccttacggcatccgcctgatcaaaggcagccacatcgtggtgccgcgcgtgcacgatcagccgcagtcttacattctgcagaacgaagaccaccgcatcgtgttcgtgatcccgtggaatgacgagttctccatcatcggcaccaccgacgtggagtacaaaggcgatccgaaagacgtgaagatcgacgagaacgaaatcgcttatctgctgaaagtgtacaacgatcacttcaagaagcagctgggccgcgacgacatcgtctggacttactccggcgtgcgtccgctgtgcgacgacgaatccgattcaccgcaggcgatcacccgcgattacacgctggacgtgcacgacgagcagggcaaggcgccgctgctgtcggtgttcggcggcaagctgaccacctaccgcaagctggccgaacatgcgatggaaaaactggcccactactacccaggctgcggcccggcgtggaccaaaaatgccacgctgccgggcggtgacatcgacggcgaccgcgacggttacgcggccaaactgcgccgtgcgcacggctggctgccggaagccctggcgcgccgctatgcccgcacctacggcagccagagcgagctgatcctggccggcgccaacggcctcgccgatctgggcgaagatttcggccacggtctgtatgaagccgagctgcgctacctgaccgagaaagagtgggtcgtagagctggacgacgccatctggcgccgcaccaagctgggcatgtggctggacgaagcgcagcaggcgcgagtgaaagcctggctggcggaacacgcgaaaacgaaagcgctgtctttggcttcctgagctgcagcgtaacgaaaaagggccggttatccggccctttgcttttttcctctctcgctttacagtttcaccggcttaatgtgccaaatttcatccgcgtattcctgaatggtgcgatcggatgagaagtagcccatattggcgatattcagcaccgcgcgccgcgtccactcgtcctgattgagatagacctcgtccaccttgtcctgcgtgtccacatagctgcggtaatccgccaacagctgatagtgatcgccgaggttgaccagcgagtcgaacaaattgccatagcgtttcggctcttccgggctgaacaccccggtggcgatctgcgtcagcgcctgatgcagctccgggtcctgctcatagtactggcgcgggttgtaaccgttgcggcgcagttcctcaacctgctcggcggtattgccgaaaataaagatattctcctcccccacgtgctcacgcatctcgacgttggcgccgtccagcgtgccgatggtcagcgcgccgttcagcgcgaacttcatgttgctggtgcccgaggcctcggtgcccgccagcgagatctgttccgacagatccgccgccgggataatgatctgcgccaggctgacgccgtagttcggaatgaacaccaccttcagttgggtatgcacgcgcggatcgttgttgatcactttggccacatcgttgatcaggcggatgatctgcttggcggcatagtaggctgaggccgccttgccggcgaagatcaccacccgcggcacgcgctcgatgtcagggtcggccagcaaacggttatacagcgtgatgacgtgcaacacgttgagcaactgccgtttgtactcgtggatgcgtttgatctgcacgtcgaacagcgcatccgggttgaccaccacgttgagcgttttggcgatgtacagcgccagccgctccttgttctgccgcttggcgcgctgcaccgcctgcaggaagctcgggtaatcgatgttggccttgatctcgctcagctggctgagatcggtgcgccaggtttggccgatgcagtcgtccagcaccgccgccaacggcgggttggccagcgccagccaacgacgcggcgtcaccccgttggttttgttgcagaaacgagtcgggaacagccgggcgaagtcggcgaacagcgactgcaccatcagttcggaatgcagggcggaaacgccgttgaccttgtggctggccaccaccgccagccacgccatgcgcacccgacggccgttggtttcgtcgatgatcgagacccgcgccagcagatcgttgtcgcccggcgccacttcctgcaccatcttgaggaagtgatcgttgatttcgaaaatcagctgcagatgacgcggcaagatgcggccgagcatgtccaccggccaggtctccagcgcctcgctcatcagcgtgtggttagtgtaggagaatacctgctccaccacttcccaggcgtcgagccacttgaacttgtgctcgtcgatcagccggtgcatcagctccggaatcgacaacaccgggtgagtgtcgttgaggtgaatggcgatcttgtccgccaggttgtcgaaggttttgtgcatcagccaatggcgattgagaatatcctgcaccgtggccgacaccaggaaatactcctgccgcagccgcagctcgcgcccggacgaggtcgaatcgtccggataaagcacgcgcgacacgttctccgaatggtttttatcttccaccgccgcgaagtaatcgccctggttgaacttgccgaggttgatctcgttactggcctgcgcgccccacaaccgcagcgtgttggtggcgtcggtgtcgaaaccggggatcacctgatcgtaggcgatggccacgatttcttcggtctccagccagcgggccttggccccctcctgctgcacgcggccgccgaagcgcaccttgtagcgggtgttatggcgcggaaactcccacggattgccgtactccagccagtagtccggcgattccatctgttggccgttgacgatgttctgcttgaacatgccgtattcataacgaatgccgtagccgcgccccggcagcgccagcgtcgccagcgagtcaaggaagcaggccgccagccggcccagaccgccgttgccgagcccggggtcgttctcttcctccagcagctccgccaggttcagccccatctcgttcaacgcgttgtcgatgtcctgataaatgcccatcgacagcagcgcgttcgacaacgtgcggccgatcagaaactccatcgacaggtaatacacctgccgcacgtcttgagacagctgggcgcggttggaacgcagccagcgctccaccatgcgatcgcgtaccgcgaacagcacggcgttcagccaatcgtgccggttggcgatggccggatccttgccgacgataaacatcagcttataggcgatggagtgtttcagcgcttccacactgaccgtaggtgaggtgtaactaaacggtgaagtcatggctttttaatcccttgtagggagccccgccattcgccgcggaatagcgggctccgctgaacatggacgcggcacgccgcgccccgacaatctacccttacggctgcccgccgcgcgtcaacccgaaacgcgaaacgcgggctacaagcgttgataaagcgataaatactctttcgccgccaccggccagccgaagtccacgctcatggcgtggcgctgaacgtggcgccagtgtttcggccggctccacagcaccatggcgcggcggatggcgttgcccagcgcgacagcgtcgcaatcgtcgaacacgaatccgctggcggtgccgtcggccaggttctccagcgcgcagtccaccaccgtgtccgccagcccgccggtacggcgcaccagcggcagcgtgccgtatttcaggccgtagagctgcgtcaggccgcagggctcgaagcggctcggcaccagaatgacgtcggcaccgccgatgatgcggtgggagaaggattcgtgataaccgatctgcacgccgacctgttcagggtagtcggcggcggcggccagaaacgcctgttgcagcaccgcatcgccggcgcccagcagcgccagctgcccgccctgcgccagcagttcaggcaacgcctgcagcaccagatcgaggcctttctggctggtcaatcggctcactaccgcgaacaccggcagtgattcgtccaccttcagccccatggccttttgcagatgcagcttgtttttgaccttgcttttcagatcgtcggcgtcatagcgggcgctcagccgcgggtcgtgggccggatcccaaatcttgtcgtccaccccgttgaggatgccgctcagcctgccctgccgctgccgctcctgcagcagcccctccatgccgtagccgaactccggccgggtgatctcacgcgcataggtcgggctgacggcggtcacgtggtcggcataaaacagcccggccttgaggaacgacatctggccgtagaactccaggccatagacgttgtagaacgacgccggcagccacagctcggtcacgtgatgggcggagaacagcccttgataggccaggttatgcaccgtgaacaccgaacgcgccgggtggccgttggcggccagataggcgcagctaagaccggcgtgccagtcgtgagcatgcaccagctgcgggcgccagtagcgatccagccccttggccagctcgcaggccatccagcccagcagcgcaaagcggcggtggttgtcggggtaggcatacatggactgatcgtggtacgggctgcccggccggtcatacagccagggcgcatcgatgagatagatgcccacaccatggtaggtgccgtaacgcaggccaacccggccggcgaacgagtcgatttccgccaccagcacggtgtcgggtatgccgttgcgtacgtcaggaaaagcgggcaatagcacccgaacatcggcgccttcggcgatttgcgccgccggcagcgcgccaaccacgtctgcgagtccgcccgttttcagcagggggaacatttcagaacatacgtgtaagacctgcattatcactcctgaaagtcggccgaaggcctctggataagaaataaagcaggcttgccgctgttatgtgtgccgcgttgcgcaagccatcgaaccgttcatcgggcggcaggctatcgttctgcccccacgttaactcacaattttgacaacatttcgcgcgtcaccagcacgatgccgccttccgagcgatagaaacgcttgctgtcctcatcggcgttttccccgatcaccatgccctccggaatgtggcaggcgcggtcgatgatgcagcgccgcaggcggcaggaacggccgacgttcacgtccggcaacaatacggtagagtcgatggtgcagaacgagttcactcgcacgcgcgggaacagcaccgaatgcaccaccaccgatccggacacgatgcaaccgccggacaccagcgagttcatggtcatgccgtggctgccggagcgatcctgtacaaacttggccggcggtagcggctccatgtgggtgcggatcggccaggcgcggtcgtacatgtccagctccggcgtcaccgacgccagatcgagattggcgcgccagtaggcgtccagcgtgcccacgtcgcgccagtacggcggcagatcggggttggacgtcacgcaggacaaggtaaacggatgcgcccacgccgcctgctgcgcggtgattttcgggatcagatccttgccgaaatcgtggctggagccgggggtcgacatatcctcttccagcagttggaacagataggcggcattaaaaatatagatgcccatgctggccagcgacatatccggattgcctggcatcgccggcggatcggcgggcttttccagaaactcgatgatacggtcgctttcatccaccttcatcacgccgaattcgccggcttcgctgcgcggcaccggcaggcaggccacggtgcactgagcgcctttctcgacgtgatcgatcagcatgcgtgaataatccatcttgtagatgtgatcgcccgccaggatcaccacgtattcggcctcgtagcggcggatgatatccaggttctggtacaccgcgtcggcggtgcccttgtaccaatgctcggtgctgaggcgctgctgggccggcagcagatcgacgaactcgttcatctcctcgttgaggaacgaccagccgcgctgaatgtgctgcaccagcgtgtgcgactggtattgggtgatcacgccgatgcggcggatgccggagttcaggcagttcgacaaggcgaaatcgatgatgcggaatttgccgccaaagtggacggcgggcttggcgcgggtggaggtcaaatctttcaaacgtgagccgcggccgccggccaggatcagcgctacggatttaatcggcaactggcgcgccaacatcagggggtctttattttcaaacctaaccatagcggactccttttattatttccgtaccagaacgcaaagcgagcgcgcggcctggtgccaggcgggcaataccgcccgtgagtcttcctgagtgaacggggcgacaacctgccaatcgccttccggcaatctcatctccgtcgtttgcggcgtggcgttgaccagcaacagccagcgctgcgacagcaggatctgcatgagcagctcgccccgctcccactgctgcgcgtcgagcggctggccttgcgcgttcagccactgcacgctgccgtcgtcctgctgccaccagcggtcctgctgcagcgcggggatctggcggcgcagcgcgatcagcgccgcgacgtaatcggtcagcgcgtcatccgccgtggcccaatcgagccaggtggtggcgttgtcctgacaataggcattgttgttcccctgctggctgtgtccctgttcatcgccggccagcagcatcggcgtgccctgggacagcaacagcgtggcgagcatcgcccgctggctggccctgcggcgttgcacaatggcgtcgtcggcgaccaggccttccacgccgtggttgttgctgaaattgcgatcgctgccgtcgcggttgccctcgccgttgggctgattgtgtttctcgttgaaactgaccacgtcttgcagggtaaaaccgtcatgggcggtcagcatgttgacggtggcgtaaggcgcccgcccgcgctggttgtacagatcgctggaagcggcaaaacgccgggcgaactggccgagcgacacgccgctctgcagccagaaacggcgcatgtcgtcgcggtaatgatcgttccattcggcgaagcggccgggaaatgcccccacctgatagccgccggggccaatgtcccagggttcggcgatcagcttgcagcgcgacagcagatcgtccgccagcatcgcctggaacagcggcgcatcgcgatcgaaccccggcgtgcggcccagcacgctgcccagatcgaagcggaaaccgtcgacgtggcactcccgcacccaaaaatgcaggcaatccatcacccaggctacgccctgcggctgatccaaccgcagcgtgttgccgcagccggtgtcgttgacgtagtccccttcgggcgtcagccagtagtaactcagattatcgatgccgctcagcgacaacatcggcccatccctgtccagctcggcgctgtggttgaacaccacgtcaaggatcacctcaatgccggcttggtgcagcgccttgaccgcatcgcgaaattcgttgagcggcgtggcatcggtgctcaggctggcgtagcggttgtccggcgcatagggcgccagcacgttataaccccagtagttgatcagccccagccgctgcaggcgcggttcggaggtatgttgctgcaccggcagcaattccagcgcggtgatgccgaggcgtttgaagtgggcgatcatcgccgggtgccccagcgcggcgaaactgccgcgcagcgccggcgggatctgcgggtgcagcagcgtcaggccgcgcacgtgcgcttcgtaaatcaccgtctgtccccagggcgtggcgggcgggcgatcgtcctgccagtcatactgttcgtccaccaccacgcacttcggcatcagctcggcgctgtcgtgcgggtccggctgctcgtaaccgccgtgcaggtgcgggtggtccgccaccggcccttccaccgcgcgcgcggccggatcgagcgccagcttgttggggttgaagcgctgcccgttcgccggatcaaacgggccgtagacccggtagccgtaacgttgccccggcctgccgcccggcaaatagccatgccaaatatcgccgctgcgcgccggcagcggcaggcgcacttcgcgctgctggccgtcgaacaggcacagctccacccgctcggcatgcgccgaatacagggtaaaattgatgccttcgccgtcatactgcgcgcccagcggcgcggcgcggccagccgtcagctcggtcatggcgcctcccgcagcagataaatggtcgacaatggcggcaacgtcacgctgatagagaaatcgcggccatggctgccgaccatttcggaagagacccgcccctgattgccggcgttgctgccgtgatagtggtgcgaatcggtattgaggatctcgcgatagtcaccggcgcgggaaatgccgatgcggtagcggtagcgcggcaccggggtaaaattgctgatggcgatcagctcattgccctgcgaatcgtagcgcgcgaaggcgaacaccgagttatcgtgatcgtcgaccaccagccactcgaagccatccgggaagtagtcgcgctcgtacagcggcgcctgctgccggtagcagtggttcagatcgcgcaccagccgctgcacgccgttatgccagttatccagcccttccaataaatgccagtcgaggctggtatcgaaattccactcgcgcccctgcgcaaattcgcagcccataaacagcagctttttgcccggatgcgcccacataaaaccgtaataggcgcgcaggttggcgaacttctgccaggcgtcgcccggcatgcggtcgaggatcgattttttaccgtgcaccacttcatcgtgcgagataggcaacacgaagttctcggtataggcgtacagcatgccgaaggtcatctggttgtggtgatacttgcggtgcaccggatcgcacttcatataattgagcgtgtcgtgcatccagccgaggttccatttgtaatggaaccccaggccgttggcgtccggcggcagggtgacgccgggatagtcggtggactcctccgccagcgtcaccgcgcccggctgcgcctggccgatagtctggttggtataacgcaggaaggcgatggcctccagattctcgttgccgccgtagtaattcggcacccattcgccgtcggcgcggctgtaatcgcgatagatcatcgacgccaccgcatcgacccgcagcgcgtcgatgccgaaacgctccagccaatacagcgcgttgcccgccaggtagttgcgtacctcgtgacgaccgtagttgtagatcagggtattccagtcctgatggtagccctcgcgcggatcggcgtactcgtacagcgcagtgccgtcgaaattcgccaggccgtaggcgtcgctcgggaagtgccccggcacccagtcgaggatcacgttgatgcccgcctcatgcgccgccgccacaaacgccctgaagtcggccggcgtgccgaagcgccgggtcggcgcatacagccccagcggctgatagccccagctgccgtcgaacgggtgctcgttgatcggcagcagctcgatatgggtgaatcccatgcccttcacataatcgatcagttgcactgccagctcgccgtagctgagccagaagtggttgtcagtgtggcggcgccatgagccgagatgcacctcgtagatggcgatcggctggtcaaaatcgttggcgcggcggcgcgccggcgtcgacggcaccacctccggcagcggcgccaccagcgaggcggtatccgggcgcatctgcgcctcgaaggcgtcaggatcggctttcaactgagtattgccgtagcaatcgacgatttcatatttgtacagctggccggcctgcacgccgggcaagaacagctcccagatgccgttttcacgccgcagacgcatcgggtggcggcggccgtcccagaagttgaattcccccaccaccgaaacacgctgggcgttgggcgcccagaccgcaaagctgacgccgtcgattccatccagcgtgacgaggtgggcgcccagccgttcataggggcgcaaatgcgtaccctcagccaatagccaactgtcgatatcctgcagcagcgggccgaatcgataaggatcgtcgacgatctgttgatgatcgcgccagctgacctgcagctgatagcggaaaggatttttgcgccgcggcaccaccgcgctgaagaaaccgcgcggatcgtcgcagttcagctgcaccagccgccggccggtttgctgttccaccagccagactgcgccggcgtccggcagcagcgcgcgcacctgcagaccgttatcggtcgcatgcatgccaagcagagcgaagggatcggcgtaatggccggcgatgatctgatcaatcacgtcacgatcgggaagtacaggcatagtcttcttccttagattaacagcatgatctaagcacggcttgttgattattccttggccgttttggtcatcatgcaatgcattcggactctaaagcgtgattgcggtcggttattgaccaatctttactctgccgacctgaatttcgctctttatgcttattttttgaaatatttcagtcatggtgaaaaattgtccacccatgcgttaagcatagccaatgtctgttaaaaactgctcagcattgctcaggaaaattattcattaagaaaactgccagcctggcggcgtttgcatgcggcggctgacgaggagataggcgggatcccgcccattgaaacgaggctggcgatgacgctgcccgacgcggtgcgcggcgaacaaaaaagcggaaaataaggcattagggggctgaaagcagccagccccctggaagtgcgggtttacagcaggatacgcagcatgcggcgcagcggctcggccgcgccccacagcagttggtcgcctacggtgaacgccgacaggtactccggccccatattcagcttgcgcagacggccgaccggcgtattcagcgtaccggtcaccgccgccggcgtcagttcgcgcatggttagttcgcggtcgttcgggatcacgcgcacccagtcgttgtgcgtcgccagcatctgctcgatttccggcagcgacacgtcttttttcagcttcagagtgaacgcctggctgtggcagcgcagcgcgccgacgcgcacgcacagaccgtcgaccgggatcacgctgccggtgttgaggatcttgttggtctccgcctggcctttccactcttcgcggctctggccgttgtcgagctgcttgtcgatccacgggatcaggctgccggccagcggcacgccgaagttatcggtcggcagtttgccgctgcgggtggcctcggtcaccttgcgttcgatatccagaatggcggaggccgggttctgcagctctttcgccacgtcggcgtgcagcatgcccatttgggtcagcagttcgcgcatgtggcgcgcgccgccgccggaggccgcctggtaggtggcgaccgacgcccactccaccagatcgttggcgaacaggccgccgagcgacatcagcatcaggctgacggtgcagttgccgccgacgaaggttttgatgcctttgtccaggccctgctgaatcaccgcgtggttgaccggatccaggatgatgatggcgtcgtcctgcatgcgcagcgacgaggccgcgtcgatccagtaaccctgccaaccgctggcgcgcagcttaggatagacttcgttggtataatcgccgccctgacaggtaataatgatatcgagcgcgctcagcgcgtcgatgtcatacgcatcctgcagcgtgccctgctggccgccaaaggccggcgcggcggaaccgtgctgcgaggtggagaaaaagaccgggcgaatggcgtcgaaatcgcgctcttccgtcatgcgttgcatgagaaccgagccgaccattccgcgccaaccgatgaaaccaacgtttttcataatatctgtgtcccgcccggataagggcttattaggtgataacgagttgtgtgcaatatctcctcaccttacaaaatgtcggcgcgggcgcaaagtgaatttattcgatggctggggatttctcagcaatccttcttataggcaaggacgcggccgtaaaggccgaggcgttttcccgatcacgaggtcaccatgacagagatgatttccgctacggtattgctgtttttaattatggatccgctgggcaacctgccgattttcatgtcggtgctcaagcatctggagccgcgccgccgccgggtggtgctgatccgcgaactgctgatcgccctgctgctgatgctgatctttctgttcgccggcgagaaaattctggcgttcctcaacctgcgcaccgaaaccgtctccatttccggcggcatcatcctgtttctgatcgccatcaagatgattttccccacgcaggaggggaacagctccgggctgtccgccggcgaggagccattcctggtgccgctggcgatcccgctggtggccgggccatcaattctggcggcgctgatgctgctgtcgcaccaatacccgcatcagctgccgcatttggtggcggcgctgctgatcgcctggggcctctctgcggccattttgctgatgtcgaacctgttcctgcgcctgctgggcagcaaaggcgtcagcgcgctggagcggttgatggggctgattctggtgatgctgtcgacccagatgttcctggacggcgtgcgggcttacatgaagctgtaggcgcctggcggcgccgacaacggtccgcgctcagcgggcggtaacgcggcgaatataggcgagcgtatcggcaaccacgccgtccaacggctggttgatgtcgatcgcttgcacatccggctcctgctcgcccggctcttccagcgtggcgaactgggaaatcaacatctgcggcttgaagaaatggcccttgcgttgcttcagacgctcctcgatcactgactggtcgcctttcagatacaggaaatgcaggttgagattgccgtcgcgcaggcgatcgcgatagcttttcttcagcgccgagcacaccagcagcgacacgtcgttggtgcgctgcatggcgaagatggcgtcgttcagggccgccagccacggcgcgcgatcgttgtcgtccaacgcatgcccggaggacattttgatgatgttggcgcgcgggtgcaggtaatcgccgtccagcatggcggcgttggcctggtgagcgacagcgctggccacggcggatttgccgctgccggaaacgcccatcaaaacaaatacgtgattctgcggattgctcattgtgtcatgcccttatgggaactggcgcgagcgcgccaaatgcgtcccaactgataaagatactctggaacgccgacgccccgcagggcgccggataaagattatacgaccgtcgccagcagcagacagcccaccaggccgcacaccgagataatggtttccagcaccgaccaggatttgatggtttccatgatgctcaggttgaagtactccttgaacagccagaagcccggatcgttgacgtgcgagaagatgacgctgccggaaccgaccgcaatcaccatcagctcagggctgacgccggtggtggcgatcagcggcgccacgatgccgccggcggtgatcgccgccacggtggcggaacccagcgccagacgcagcgcagcggcgatcgaccaggccatcaggatcggcgaaacgttgctgccttccatcaggccggcgatgtacttctcaacgccgctgtccaccagcacctgcttgaaggcgccgccgccgccaatgatcaacagcatcatggcgatgattttaatcgagtcggtgatggtgcccatcacttcatccatggtacggccacggttcaggccgaaggtgaagatggcgatcagcacggcgatcagggtggccatcaccgggtcgccgaagaactcggcgaagcgcagcaggctgtggcccttcggcagcaccatttcagcgaccgcgcgcagcgccatcaggatcaccggcaccagcgacgtggcgacgctgacgccaaagcttggcatctccgcgtcggtaaaggttttcgggttgtacaggccttccggcaccggcttgtcgatgcctttcaggaagcgggcatagaccgggccggccaggatcaccgtcgggatcgccagcagcgtgccgtacagcagggttttacccatgtcggcatggaagatggtggcgatggcggtcgggcctgggtgcggcggcaggaagccgtgggtcaccgacagcgcggcggccatcggcacgccgacgtacagcagcgggatacgcgcggaggcggcgatggtgaacaccagcggcagcaacagcacgaagcccacttcgtagaacagcgcgaagccgacggtgaagccggtcagcaccaccgcccattgaatgtgttttctgccgaacttgtcgatcagcgtggtggcgatgcgctgtgcgccgccgcagtccgccagcagtttgccgagcatggcgccgaagcccatgatcagcgccaggctgcccaacgtgccgcccacgccggccttgatggagccgatgaccttatcgaccggcataccctgcgcgatcccgaccgccaaagcaaccagaaccagagagataaagccgttcagcttgaagcggatcatcagcagcagcagcagcgctacgccgcctgcaacaatcactaatggcatagtttttctccaaccttttatcgcgactctctttacaataggcgtaaagcgtgcggttgttttatttttaggctctttcccggtgtttaagaagagctgtaggtgttgttgagtcagaggttcagtcttgcagcaagatgaccgcgcactcgttgttaccggtatcatgataccggtaacaacatgagcgccggaaccgggtaaccggctaaaattcgcgttctgggacagagatcaaacttatgccggcaacgagcggcgggcttacaggcggggtaaccagcgcgcctcagggcgcgctgtaaaaagaaagagtgttaaaacagaacgttaaaatggctcagatgctgccgccggggatcacggtgaaaccgacgtccaccatgcgcgggcacaccgtttcgccgcgcagccgggccagcaagcgctcggcgccgatctggcccatgcgttcgcgcggcgtcagcacgctggccagcttcggcaccatcacctggccgatgtcatggccgtggaaaccggcgatcgccatgtcctgcgggatcgacagcccttgccgctggcattcgaaggccgcgccgatcgccaggtcatcgttggtgcagaagatactgtcgatctgcgggtagtcacgctgcgcctggcgcaacagctcgccgccggcggaataagaggaagaacgcgcggtcatgatgctgtacggctccaggccggattcacgcatcgcctgctcatacccctgctgcttgatgatggtacgctcatcctgacgagcgccgaaatagaccacgtgacggtggccgtgcgcgatgatctgctgggtcatctggcgcgccgcctcgaagttgttgaagcccaccgccagatcgatgcacggtgagacgcagtccatcagctccaccaccggaatgcccgccacctcgatcattttcagggtgcgcggcgtgtgatggcgctcagacaggatcaggccgtcgatattgtaagacagcagcgaggtcagacgctcttcttcacgctccggcaggtagccatagtgcgccagcatggtttggtagttgtgcgcgtcggttacgctttcgatgccgcgcagcacttcggcgaacacctggttggtcagcgacggcaacagcacgccaatcgcccggctggtggcgttggagaggatatccggcgcgcggttggggatgtagcccagctcatccagcgcgacggcgattttttgctgcagggcggcggaaacctggtcgggattgcgcagataacggctcaccgtcatcttggtcacgcccaccttgtccgccacatcctggagtaccggccgttttttcttcattatcaatgaactgactaaccgtgaatgggcaatcattttagcaaaaaaaacggcgggccgatattgtcggttatgcgacagccaacgcaaaaagggctcacacagtgagcccttcatacgctgacaaagggggaaaaagcgtggtttttccccctttgtgatgattagccgaaaatcaataaattgattttccttgtttttatatgctggcggcgtcaagtcaggcaacatcgtcagacgtgtcattaacctcaagggctcacaccgtgagcccttgaaatttaccgcttaatcacaccggcggcagatcgaacagcaggatttcgctctcttcgtcggcctggatcgtcagcgccgattcatcccacaccgcgaacgcgtcgctgatgccggcggtctggccgttgaccgagaccttgccgcgcaccacctggatccaaacgcgacggccggcggcaatcgggcattccccctgctcgcccttattcagcgcccaacgcgacagcgtcatatcctggaacaccttcagcgagccgtcacgcgcatccggcgacagcaccagctgacggccctgcggcgcgtcgaacatgcgctgctcgtagcgcggctccagcccgacctgatccgggatgatccaaatctggtacaggtgcaacggacgatcctgattagcgttgtactcagagtgacgcaccccggtgcccgcactcatgatctggaattcaccggcctggatctgctccttgttgcccatgctgtcctgatgttccaccgtaccgctcagcacgtaggtcaggatttccatgtctttatgcgggtgagtaccgaaaccctgccctgcgtcgatcacatcttcgttgatcactcgcagcgccgagaaccccataaagttcggatcgtagtaatcggcaaatgagaaggtgtgccagctatccagccagccatgattggcgtggccgcggtcttccgctttacgtacataaatcattttcaactctcctcaatgtttttttacagtctagtcctgccagcagaataagaaagcgtaaaaaactcatgcctctgttcaaaaatttcgatggaatgaaacagcggatgggcagcggatttgttgaaagcggaaccggctgaaaaagggcaaaaaaaaagccagcacccgagctggctaagtaaacactggaagcaatgtgagcaatgtcgtgccttcgcagcgagagtatcaaggattgatgccctccccggaacgcatcgcaataataatcattatcattcgcacctgtaaagcgttttttttgacccgttgaaataatattgactcaaggcagtaaacggataaattcagaggttattcaaccggtaagcaaaaggagcagcgagatgagcgagatcgtgatacgccacgtggaaacatcggatgctcaggctctgcatcatctttattctcagacgcccgtctaccgcgatacgctgcagctcccgctaccgtccgtcgagtcctggcagaaacgcctcgccaaccccgaaccgggcacgcataacctggcggccttcgttgacgggcagcttgtcggtcagttagccgtgatgctgaatcagcgcgttcgccgccgccacgtggccaccttcggcatcggcgtcgatccgcgctaccacggtaaaggcgtcggcagccgcctgatgcaggcgatgatcgacctgtgcgacaactgggcggccatcgagcgcatcgaactgacggtgtttaccgacaacccggcggccatcgcgctgtatcgcaagttcggttttgagattgaaggcaccagccgcgctttcgccattcgcgacggcgtgctggtcgatgcctaccatatggcgcgttttcgctccgggcagccgcgcggcgatgcgtgatctcatccccccgcaggggccgctgcgccggcccctgaatatcaaccgccgaacctttttacacgcgctggccggcctgaccgccgccggcatgttctcccccttcaccccattaggtgccgctatgccaacttccgccgccgggcgccctggcgcccgcaacctgattaccgatgtgcccggcctgaaggtcggcgtggcgcaggacagccgggtgcgcaccggcgcgacggtgatcctgccggacagcccggcgattgccgccgtggacgtgcgcggcggcggccccgccacccgggaaaccgacgcgctgggtgaagacaatttggtacagaccgtcgatgcgttgacgttcagcggcggttcggtatacggcctggcggcggcggacggcgtcgcggcctggctcgggctacaaggcagaggctatgcgctgcggccggctcccggcgtgccggtctcacctatcgtgcccaccgcctgcctgtacgatctggccaacggcggcgataaaaactggcagctcacgccgccgtatcgccagctgggcatcgacgcggtcggcaaggctggattggactttccactgggcaccgtcggcgccggctacggcgccatgacctgcatgggcaagctgaaaggcgggctcggttcggcatcgatcgttgccgccagcggcgctaccgtcggcgcactggtggcggtcaacagcctgggagcggtggtggcgcccggcacccgcgccttctgggcgacgccctatgaaattgacggtgaattcggcaacggcggcgcggcggcgctggcgcaactgcgcgcgcagggcgaagactggatggtgcaagagccgcaaggcggcagaaagaacaccaccctggcctgcatcgccaccgatctggcgctgacgcgtgtggagttgaaacgggtggccatcatggcgcaagacggcatggcgcgcgctattcgcccgctgcacagcccgtttgacggcgacgtggtgttcgccctgtccaccgggcagcgcgaggtacagggcagccgcgaactggcggtgctgcagatcggcgcgctggcggcggacaccctcgctcgggcgatcgcccggggcgtatacgccgccacgccgtggccgggcagccaggtcacaacctggcaaacgctcggcggctaacgcgccgccatcaaaaaagggggccggtggcgcccctcgatctttattgccccccaccgcctaaataccggcagtttcccgaatataacggcgcgccttcaccgcatactcgaacgggttggccagcgccggatcctgctcggcctccaccaccatccaccctttgtaaccgcgctcgtccagcagcttgaacaccggcctgaagtcgatcacgccatcacccggcacggtgaaggtgcccttcttcacgccgtcgaggaagctcagcttgttggccttcacttccgccaccacctcatcgcgcacgtccttcaggtggacatggttgatgcgcggcagatacttctccaggatcgccatcatcgcctgttggctgccttccgaatagtaggcgtggccggtatcgaacagcaggtaaacgtcgtcgttgaccatgctcatgtagcgatcgatttcggccgtggtctgaatgccggtgcccatgtggtggtgcaggcacacctgcatgcctttatcggcggcgatcttcgccaactcgttgtaaccgtcggccacgcgctgccactcttcatcgctgaagtacggcttctcttcgaacacgcctttggtggtgccctgaatgctcttgctctgctctgagcagccaatcaccctggcgcccatggcatgcaggaaattcatgtggttgataaattcatcaatggttttgtctttctggccgtcggcgaaaaaggtgctgaaccaggcgttgcagatctggatgccgcgaatatccagcatcggtttcagcaccgccggatcgcgcgggtatttgctgcccacttcgctgccggtgaaaccggccagcgccatttcactgacgcattgctggaaggtgttctccttgcccagatcgggcatgtcgtcgttggtccagccgatcggcgcaatggccaatttcacgttgtctttattcatggtttgcctcggtccttgcagggccgccggtacaaacgccgccggcgagccgaatcagattatttgcccaacagctctctttcgatgcgttctctggtcgccaccgcctggctcggcatcttttccgggtaaccgaacagcgaggtgcagatgatcgattcgccgccgaccttgaagctgcggttggcaaattccatgtcgcgcagcgtctggaacagggcgtcgaaattcacctcgccttcgccgatgccgacgtgctggtgcaccgcggcgtcaacgcccggcgggttgacgatatagcggcagtgcttggtgtggttcatggtgtcggcgatcagcacgtgggacagatcgtccccggcgtactgcagcatcccggctacgtcaccctgccccttgtcgtagtagaaggtgtgcggcacgctgtagaggtatttgacgtggtcgctgcgcagcgacttcaccagatcggcggtttcgttgctcagctcgcagaagtcccacgggtgcgactggatctccatacgaataccctcgcgctcaacgatcggcagcagctcctccatcgagcgataccacagctcctcgcagatctccggttcgttggggttgccggccagctcggtgttgatcacctgcacgcccatttccaccgcgatttcgatcatccgccgccagtttttgaccgccgcctggcggcgatcttcccccggaccggaccagcgatacaccacgataaatgaggagatctccacgccggtcgcttttagggcgtttttatactccgccatgatttcgcggctggccttcggatgtttgtaaaacgggttgatctgcgggtgcggcgactgctcgatgtatttgtagccccagtccgccacctgctgaaccattttggtgacgcccaaatcccggataacgtcgacatcaaaagcgatcttcatggtcactcctctgcaatcgtggttacgcgctgcgagcggttatttaccgtaaaacgccgggcgcgccggcagggtcaccggcacgatctcgccgctgagctgggccgccacgcaggcgtcggcggttaccgcggcggcgtagccgtcccaggcggaaggcccggtcaacttgcccgcggctacgtcgttgatgaagccctgcagctcgacgtcataggcatcgataaagcgatccttccagtcggtcaggatttcggtcgacaggcgggcgccgctgcgcatctgcaccgaggacggttccggcagtttggcgatgccggtttcccccaccacttcgcactgaatgtcgtagccgtactggcagttgacgaagatttcgacgtcgatgcgcgtccctttggcggtttcaaacagcacaatttgcggatctttcaggtgcgggaacgccttcgggctcttgcgtgggaacaccacctgcaccgacacatagtcgtcgtcgagcagccagcgcagcacgtcgatttcgtggatcagggtgtcggtgatcgccatatcggtggtgtaggcctcgccgaccgtcgggttgcggtgcgcgcagtgcagcatcagcggctcgccgatctggccgctggtcagtacctgtttcagcgcgcgatagccctgatcataggggcgcatgaagccgacctgcaccagccgtttgccgtgcttcgcttcggcgtcgacgatgtttttgcagccctgcgcggtcaccgccagcggcttctcgcagaataccggtttgccggcggcgatggccgccagcacgaactcttcatgactcggcccccaggaggtgaccagcaccgcctgcacgtcggcggctttgatcagatcgtggccgttgtcatacacccgcgcatccagctgcagatcgctcaccgctttggcggcgttgtcgcggttgatgtcgttgaccgccaccacgcgggcgccctgcaacactttgctgcagcgacggatatgatcgcggccgatggcgccggtgccgataaccccaatgttcaatgtcattttcgctaccctcgagattaatgtatgaaaacgaatcagtaatcgcgcgccttatcgatgttttcctgcagcttgcgcgccactgcgacgattttttcgctgtcggccacctgagcgccgcccacgcgccaccagctgagatacttgtgcaccatggtcttcggcagcaccttgatgtccagcagcgtggacacggtttgcctgcgggcgtcggccagcgcgtcgagcaactgctgctcggtggtgacgcgataggttttacagccgtaagccgccgccagcatggcgaaatcgaccggcaccagtttgccgtcgagcttgccgccctgtggattgcggaagcggaattcggtggtgtagctgtccatgccgtgttccatctgcaggttgttgatgcagccgttggtcatgttgtcgaacagcaccacgttgatcttgcagccttcctgaatcgaggtgaccagttcggaatgcagcatcatgaaggcgccgtcgcccaccatcgcgtacacctcgcgctggggctcggccagcttgacccccagcgcggcgttcacctcgtaccccatgcaggagtagccgtattccacgtggtaaccgtgctcgccgcggttgtgccacacccgctgcagatcgcccggcaggctgccggcggcggcgacgatcacgctgtccggcggcagctcgcggttcagcacccccagcacccggctttgcgtcatcgccgagccggtctgggcgataaattcgtcgaacacctgctcgcggtcgaggtgatcgtctatctccggcacaaagtctgcgccgctgtattccaccgagtaaacacgctcggtctcttcacgctgggcaccgcgcgccgcggcgatggcgtcgccccagccggcgcgataatcggcctgcgccagcagcgcgcccagtgcgttcagggcctcgcgggcgtccgccagcacctgcacgccgtcgagcttgccggcgtcgaaggcgctgacgttgatattgaggaagctgacgtccgggtgttggaacagccatttggacgaggtggtgaaatcggtgtaacgggtgccgacgccaatcaccagatcggcctgccgggccagcgtgttggccgccaggcagccggtttcgccgatgccaccgaggttgaattcatggtcactcgataccgtgcctttaccggcctgggtctcggcgaacggaatgccgaagcgctcggcgaattcgcgcagcgcccgcccggcctgcgagtacttcacgccgccaccgcacaccagcagcggtttgcgtttggccgtcagcagcgctaaggcgtccgccaacatgccgtcggtcgccgggcggcgatcgagccgatgcacgcgcttttggaagaaatagtcggggtagtcgtaggcttcaccctgcacgtcctgcggcagacacagcgtcaccgcgccggtttccgccggatcggtcaacacgcgcatcgcattgatgcaggcgctcatcagctgttccgggcgcacgatgcgatcccagtatttgctcaccgcacggaacgcgtcgttggtgctgatgctgagatcgtaagactgttcgatttgctgcaacaccgggtccggctggcgggaagcgtaaacgtcgcccggcagcagcaataaaggaatgcggttagcggtggcggtggccgcggcggtgatcatattggcggcgccggggccgaccgatgaggtgcaggcgtaaatttgccggcgcagcttctgtttggcgaagccgatcgccgcatgggccatcccctgctcgttgcggccctggtgcacccgcagatcgccgctatcctgttccagcgcctgccccagccccagcacattgccgtggccgaaaatcgcgaaaatgcccgcgacgaatttggtttccacgccgtcggccagcagatactggttatcgagaaatctgacgagcgcctgcgccatggttaacctgatcttgcccatttacccaccctttagattaagggccgccccggaaagcgctcatgccgagccgacaatcccgtgtttgtgttacgcggcggcagctattatcttgagcaggcgatgcccgcgctgctcacgaagtcgacaacctgaaacgtgaagcgattataaacaaatatatttttcataaaatcacattacagaagaaacatttcattttgcgataaagatcgcatattgcatgaaaagcccgtttcatctcgtggttcagccttcatgggcttcgtgccgcgcaccggccgataaaagtcgttggcacatgggctgacagccttttcctctgccctcacctcccttttatgttccgccccggcggcccttgcgcagccgattcatcgccttttcccacgcctctgtcgatgttttaaacgcatcacatttttggggtgtaaatttcatttcatattgaaattgaaattttcattccccatactgtccccatgcttcctgcagggcgccacgctcgggccgccgccggagttttgcttaacagaaggaaacgggtatggctacacaacaaaaacagcttgatgtcatttgtctcgggcgcatcgccgtcgatttctatgctcagcagatcggcgcgcgtctggaagacgccggcacattcgccaaatacctcggcggctcttccggcaacgtggcctacggcaccgccattcaggggttgaaatccggcatgctggcccgcgtcggcgatgaacacatgggccgctttctgcgtgaagagctgcagcgcgtcggagccgatacccgctgtctgatcaccgacaagcaacgattaaccggcctggtgatcctcggcatcaaggatcaggaaaccttcccgctgatcttctaccgcgaaaactgcgcggacatggcgctgacgccggacgacatcgacgaggcctacatcgcctcctcccgcgcgctggccatcactggcacgcacctgtcgcacccgaacacccgcgccgcggtgctgaaggcgctggagtatgcgcgccgccacggcctgcgcaccgcgctcgacatcgattaccgcccggtactgtgggggctgacgtcgctgggcgacggcgaaacccgctttgtggaatcagaccaggtgacccgcgaactgcaggaggtgctgcaccatttcgatctgatcgtcggcaccgaagaggaatttcatatcgccggcggcagcaccgacacgctgacggcgctgaaaaacgtgcgccggactaccgcggccacgctggtgtgcaagcgcggcgcgcagggctgctcggtgttcgaaggtgaaatcgccgacgactgggcgcaggtgaagctgcacgccggtgtgcgggttgaagtgctgaacgtgctgggggccggcgacgcctttatgtccgggctgctgcgcggctacctgaacgatgagggctgggagcaggcctgccgctacgccaacgcctgcggcgcattggtggtttcgcgccacggctgcgcgccggcgatgccgaccaaacgggaactggacgactacctgcagcgtgaacagcaggtcacgcgcccggaccgcgacgcacgcctgaaccacctgcaccgggtcaccacccgcaagcaacagtggccggaactgtgcgtgttcgccttcgatcaccgcaagcagctggcggacatggcgcgcgaagccggcgtcggcgaggaacgcattccgcgcctgaagaccctgctgctcaccgcggcgcaacaggctgccgcgcaggccggcctcaacggcaacagcggcattctggccgacaccacctatgggcaggcggcgctgaacgagatcactggccagggatggtggatcggccggccggtggagctgcccagctcgcgcccgctgcgcctggagcacggcaatatcggttcgcaattgatcgactggccgcaggagcacgtggtgaagtgcctggtgttttatcacccgcacgatgcggaggaactgcgccgcgaacaggatgagctgatcgccgacgtctaccgcggctgctgtaaatccggccacgagctgctgctggaggtgatcctgccggacagcaacgccgacaaagacgaacgttattacctggagatgattgagcatttctaccagttgggcattcagcccgactggtggaaactgccaccgctgagcgcagaaaactggcggcaggtcggtgccctgatcgacacctacgatcccttctgccgcggcgtgctgatcctggggctcgactccccggaggcggtgctgaaggcgggcttcgccgccgccgcggatgcgcgctgggtgaaaggtttcgccgtcggccgcaccattttcggccaaccttcgcgccgctggctgcagggggaaatcgacgacgcggccctgatcgagcaggtgaaacaaaaatacctgacgctgatcggtttctggcgccagtaccgtccgcaggcgggcggcacgcactgacagcaacagcaggttcacgtccccttaaggccatttcgccgctttaaggggatttttttgccccttttctgtgaagtcgcgcaatgtgcgatcgaataaatcgctttttgaggaaatgaaatttccgctccgtctgttaaaataccctgtcaatatttcaggcatcaggccaatacgccttcaccccactgcgagccgaatggatgaacaacccaactcaactttcgctgttacaggacgagatccgccaccgttatgaaacgctgagcaagcgtttgaagcaggtggcgcgctatattttggataacagtaacagcatcgctttcgataccgttgcctccatcgccgcacaggccagcgtgccgccttccaccctgatccgtttcgccaacgccttcggcttcagcggcttcaacgaaatgaagcaggtgttccgtcagcatctgatggaagaaacggtgaactataccgagcgcgcgcgcctgttccgccaaacctctaccgacgacaacgtcgcgccggagaagccggcggagattctcaacgtattcaccatggtcaatgcgcaggcgctgcagcagctggcgatgcagattgcccccgagcaattggatcgcgccgtcgaactgctcaacaacgccgaaaacatctacgtgatcggcctgcgccgctcgttcagcgtcgcctcctacctcacctatgcgctgcgccatctggagcgccgcgcatttctgatcgacggcctgggcggcatgttcaccgaacagctgagcatggtgaaaccgaaagacgtggtgatcgccataagctattcgccgtacgcccgcgaggcggtggaactggtggaattgggcgccaagcgcggcgcgcagcagatcgccatcaccgacagccaggtcagcccgctggccgcgttcagcgacgtctgtttcgtggtgcgtgaagcgcaggtggacgggttccgttcgcaggtggcctcgatgtgcctggcgcagacgctggcggtctcgctggcgctgaataacgcccgggacgagtaaggcggatgtgaacgcgcccgacaggctcgggcgcggcgggattattgcagcaacaaatagcggtagagcgcgctttccagatcctgcttcatgctgatgaaaagcagaatctccaccgtttggccgtcgtagtcatagatgacgcggtattcgctgtcgggatccaatcgttcgtgcaaccgcactcccatgcccgccagcacggcgttgaagcgatagcggacgggatcgtcggcgattgccgcgagggacgataacaacagattgtccacgaacatcccggctgcgacggcccctatcgttccgctcttataagactcgatgtctttcaggctccattccgccgccggcgcgacggtaaaacgtatttcctggggcatcctgcacctcgggtctatttccgcgcgtcacgcagccgctgcaaggtttcttcgggcgacagaccgcgctgatttttaatctcttgcttcgccatcatagtcagtttcaacaacgcgttggactggcgctcgagattgcgttcccgtatttcggcctctctctcagccgccgtttgtacaaacagctcggcaacaccattttttgtgacgtaaaccccgccttcaaacagatcgggcgaacctaatccttcgcgcgccgctttttgagacatggtggttgtcatagtttttcctcctgtgtaccggcattctcactgcataacagcggttcgttagattcactcagccagggagcaatcgcgtgcggacaggttatcatttgagcaagagagagggcaaatttaggtcaaatttataccctgataaagagaaagcccggcaagccgggcctcaagcgcctattgcgcggcggggtaaccttcgccgttaatccaggcgtggtctttttcccaggtgaacttccactgccgtaccggcccggccatcacgttgagataatagttgtcataacccgccagggtcgccaccgggtgataaccgcgcggcactttcaccacgtcgcgattgtagaccggcatgcactcgtcgagcgtgcgatcgtcggtatagacgcgctgcatgcagaatccctgctccggctgaatgcggtgatagtaggtctcttccagataggtttcgtccggcgagtcttcccgatcgtgcttgtggctcgggtaggagctggtgttgccctcgtcggtgtaaacctccaccaccagcagactgtcggccggctcgctgtccggcagaatgttatgcaccaaccgctggttgcgccccttgccgcgccgctccacgccgatttccgccggcgtgatcaggcgtgaaggcagatggccgctgccgggcgcgctgcacaccgccaactccagatcggtttctgcccgcacgtcgatgcgatcgtggtgcggcacgtacaccgcgtaaggcggcgtgcgctcgaacgggctcatgcgtttgccgatatgcgggtattcggcgcgcagcgtggcgacggaggcgataccggccaccagtaccagacacagttccttgtcaccgcactccagctgcagcgactgcccggcggccaggcggtaaacgtcaaagccgacatagccccaaccggcattttccggcgtcacgtgctggatacgcccctcggcgttcggcgcctgacatttggcaagcagtgaagacatttcgattctcctgttaactccccgtgcaaaggccgctgcccccatggagcaacggcccgctcatactctgcgatcgcttaacccagcgtcggcatgctgaattcagacaccgtctgctgcccggccggccagcgcgcggtggcggtcttcatgcgcgtgtagaaacgcacgccgtcggtgccgtgcacgttcagcgcgccgaacaccgagcgcttccagccgccgaagctgtggaacgccatcggcaccggcaccggcacgttgacgccgaccatcccggcctgcacttcctgcacgaactggcgcgcgtagtggccgctgccggtaaagatggcgctgccgttgccaaactcgtggccgttaaccgtgtcgatggcggtgcgatagtccggcacccgcacgatgcccagcaccggcccgaagatctcttcgcggtagatgcgcatgttcggcttcacatggtcgaacagcgtgccgccgacgtagtagccttcaggatagcccggcacctgataattgcggccgtcggccaccagggtggcgccttcttccacgcccagatcgatgtagcccagcacctttttctggtgagcggacgataccagcggccccatttcattctcttcgccgccctgctgcaagcccggcccgacgcgcagctgcgcgatcagcggcttcagtttggcgatcagtttatcggcggtgtcgtcaccaaccaccacggcgatcggcaacgccatgcagcgctcgccggcagagccgaacgcgccgcccatcagcgcattgaccgtggcgtccagatcggcgtccggcatgacgatcgcctggtttttcgccgcgccgaaggcctgtacccgcttgccgtgcgcgctggcggtggtatagatatgttccgccacggtggaggagccgacgaagctcaccgcctgaatgcgcggatcggtgcacagctgcgccgcatcttcattggcgcagtgcaccacgttgaacacgccgtccggcaggccggcttctttcagcagctccgccaggcgcaccgaggccgaaggcaccagcgccggcggcttgaggataaaggtattgccgcaggccaacgcgatagggaacatccacatcggcaccatcgccgggaagttgaacggggtaatgcccgccaccacgcccagcggctgcatcagcgagaaactgtcgacgccgctgccgacgtccggcgagtattcgcccttgatcagatgcgggatgccgcaggcaaattcgaccacttccatgccgcgcgtcagttcgcccagcgcatccgaatacactttgccgtgttcgctgacgataagctcggccagctcgtcgcggtgctgttccagcagcgccttgaaattgaacatgatgcgcgcgcggcgcagcggcgtggtgcgcgaccagtcggcaaacgcccgatgagccacgtcgatggcctgcttgacttcggcggcggtgctctgcgtgacgcgccgctcaacctgcccgctggccgggttgtgcacgtcgacggtttgattgctgctgctcaggcacacctgcccgtcaataaagttacccacggttttcatgtcacgccctcttttcaagtccgctgtcgcctggccacacccaggcggcgcggcgttaatcgtcccgctcgccaaaccccgtcggcaagccggctaaatcctgaccggatgcagcaaactctatttcattgaaaaaaaagtttcaaataaattgttttgaaaaatttgtttttagtgcgtgaggtcgcaattttgcggtgtcgatcgggttggcgcttgcattgccgtgccagggaaagcgcaactgcggcggagaaagttggggtaatacacactgactttgctacagaaaacccgcactgcgcctgccctgccgccgttaccgcacgccctcgagcgctcaaggtgcccgaatcgctcgcgacggttttttttgaactggatctaaaaatcaatattccattattcactaattatgaaataaatgttcttgtttgttccagcatttatcgacgacatcgccttgatgacaggcacggttcacacccttccgctcgccctcttccctacaccccaaccgtgcggacggaagccaggataaaaatcggagcaacacatgtcatatcagcgtaagcacaataccggctacatattgcgaatttgcggcatcgccgccctgggcggcattctgttcggctacgataccgccgtgatctccggcgcgatcgaagcgttgaaagcctatttcgatctcagcccggccgaaaccggctgggccgtctccaacgtggtgatcggctgcgtggtcggcgccttcgccgccgggccgctggcggcgcgctggggccgtaaaaaggcgctgatgctggcggcgctgctgttcaccgtgtccgccgtcggcgccgcattggctccgaccttcacctggttcgtcatctaccgcatcatcggcgggctggcggtcggcattgccgccaccgtgtcgccgatgtacatgtcggaggtgtcaccgaaagacatgcgcgggcgggcgctcagcatgcagcaattcgccatcgtcttcggccagatcgtgattttctacgtcaacttcaaaatcgccagcctcgccagcgaagcctggctggtggaaatgggctggcgctggatgttcgcctcgggcgtgatcccctgcattctgttctgcatcctggtgttcgtcattcctgaatcgccgcgctggaacgtgatgatgggccgcgacgatcaggcgctggcgatgttgaccaaggtctccaacgccgcccacgcgcagaatctgctgaaagaaatcaaagactcgctgcagcaggatcaacagcagcagcaccggaagctgaactacggcgatgtgcgggtgcggttcatcctgttcgtcggctgcatgatcgccatgttgcagcaggtcaccggcgtcaacgtgatgatgtattacgcgccggtggtgctgaaaaccgtcaccgaaaacgcgcaggaagcgctgttccaaaccatctggatcggcgtgctgcagctggtcggttcggtcatcggcgccatgctgatggatcgcatgggccgcattccgctgatgcgttacggcacgctgggcgccatcgccggcctgctgctcacctcgtatgcgctctacacgcaggccaccggctatttcgcgctgttcggcatgctgttcttcatggtgttttatgcgctgtcctggggcgtcggcgcctgggtgctggtgtcggaaatcttcccgaaccgcatgcgcgcgcaggggatgagcatcgccgtcggctgcatgtgggtcgccaactttgcggtgtcgcagtcgttcccgatgatcaacgaccacccttacctgttctcgcatttccacggcgccttcccgatgtggatctttgccgcctgctgcctgttcagctactggtttatcggccgctatattcctgaaaccaaaggcgtctcgctggaaaaaatggaacaggtggtgctggccaaacgccaccgccaatccctgcccgacggcaagccgctgccgctggaaaacggcaaatcctgatctctcaccccttatcgctggagtcatgccccatgaacattgcgctggaccgcttctgcattaaccgcaagatcgcgccgaatctcgatctggacaattttttccgcctggtgaaacgctgcgggctcagcaaagttgagctgcgcaacgacatgcccagcggcaaggtgaccgacgatctgagcgacgcgcagctcaacgcgctcgccgcgcaatacggcattgaaatcgtcacgatcaacgccctcggcatgttcaatcgggtggatgaccctgcggcgctgcagcagcgcgccgaagcgttgcgggcgcgggcgcaggccatccacagccgggcgctggtgctgtgcccgcactgcagcgccgacgacacgcgcagcgagcagcaaaaacgggacgataccctcgccgcgttgcgtctgctggcgccgctgtttgcccgctacggcgtgcagggatacgtcgagccgctgggcttcggcatcagctcgctgcgatcgtcgctgttgacccaggcgatcatccgcgactcgggcgcgccgtatcgcatcgtgctcgatacgttccaccactatttgagcggtgtggcgcaagccgacttcgacgcgcagatccaggtggcgcagatcggcctggtgcatctgtccggcgtggaggatgggcgggataaaggcgcgctgagcgatgaagagcgcatcatgctgagcacgggcgatcggctggaaagccgccgccaggtacagaacctggaacgcctgggctacaccggcgtctatgccttcgagcccttctcttcgcagttggacggctggagcgaagcggatatcgaacgggaaatccgccagagcatcgccctgctgcaagggtaaaaaaacggcctccgcggaggccgtttttcatggcgttacttcaggttgccgaccaccaactggtggcgcgcattgtaaaacttacggtaagccagatagcaggcgatgatggtcgacaggctggcggtggaaagcagcataaaggtcaccataatctggtatttgatcgctttcaccgggtcgatgccggcaaagatcagcccggacatcatgcccggcaggctgaccagaccaacggttttcgccgagtccacggtcgggatcagcgaagcgcggatgctgtcgcggatcagcgccgccgaggcgaacttgggcgtcgcccccaggctgagcatctcctgaatcttctgctgctcgcttttgaaacgctggccgaggttggtgtagcacaaccccaccgccaccatggcgttgccggcgatcatcccggagatggggatcacctgcatcggcgtaaattcgatggagccggtcaataccagcaccgccaacgtcagcaccgcgccggtggtgatggcgataaacgacgtcacgaacgcgtgttcgacgtacttgctgcgtttcttggcgttgtaagccgcgttaaagcagatgaacagcaccatcaacacggtgagaacgacgttatccaggtcgaaaatatacttcagcacgtagccgacgatgatcaactgcaccaccgcgcggcagatgctccagataatgtccttttccagcgccagcttttcccggtggctgatcaggatggcgaccaccaccagcaccatcgacaagcccaaggattcgttggtgatgttatgctgattcatgctgttgctcctgttgctcggcgccgcgcgcgcgcagggtgatcacctcgtccgcatgcgctatctcttcggtatcgtgcgtcacccacagcaccgccagccggtgttccgccaccagctgatgcactacctcattgacgttgcgtttgttttcctcgtccagcgcgctggtgatctcatcgagcaacagcacccgaggcataaactgcaggttgcggatcagggacacccgctgcttctccccgccggacagttcattgatgcttttggtcagcatcgcctccggcagcccgaaacgcgccagatcggccttcatttttcgctcggccggcggttcctggcggatctggtagggcagcgccagattgtcgtaaaccgtactgccgaacagtgacggcgtctggaagcagtaagagacctgcttgcgatacgcctccggcgacatctcgtcgatcgcctggccgtcgaaatagagctttccgctggtcggatccattaaggaagagatgattttcagcagggtgcttttcccgcagccggaaggtccggtgatcagtttgaactcgccttcacccagcgtgaaagagacggaatccaggatcacctggctgtctatttgataatgaatatcatccaatctcagtatgtctttcttttccttcattacgatgccggctccctatacctgttcccgtctgagcgataagtatatggccgccaaaaacatcttagcaatggctgtgcggatggcagcgaacgaaggggaaggattgacggagcgaaacgccccgccaaatgataaatttaattaatgattagctgtaggaatagtcaaaagcgaccgccagggtcgaatcactctttttttatcgctgcctgttcgtcgcagctgtaccagcggagagaattgttgatgctgcggtgggtgcagtgaaccttaccctccttttccagcgccagcagcagggtgcgggtggtataaatattttcgccgcatttatccgccagctcgcgcgtcttcggccactgctccggcgggggatgatggcccccagatccttccacacgctccctgcacaatccttgcaacacattcagcatcagcgattttctgctttcaaacgttttcggcgccttggccatagcattcctcctgagtggttactgctgagcaccccgctcacggctgcacgtcagcgatgcgcagggtgtaaatcatggtggcattcggggggatcgccggcgggttgccctgtttgccgtacgccagcgccggcggcaccaccagcgtgatcgcaccgtgttgctgcagcttctcgatagccgcgcgaaacagcggcgggtagcgcgtcaacggctgcgagatcaccgtccccgccagctccatgtctttgactacccggccgtcggtcaggctttcgcgcaccacaatatccacccgatcgtcggcgccgatcgccccgctgccggcatagtccacccggtaatagaaaccgagcgcatcctgcttgaccccctcctggcgagcgaaattggccaggtaggcgttgtcatcccgaggcggcgcctgcgtctgttgcgcctgctgcaaccgctgctgcgccgtgtgcagcgcgccgtcgatggcggcttcatcgagccgcaaccgcccggccagggtatcggcgatgcccgccagcaacagctgggtatccgcttccagccccgcgcgccggttctcctgctgcagatgcagaatgtcgcgtccgagcgatacgccggcggcatacgcctgcttgtccgcctcgctggccagcgcaggcggctcggccgcctgctgccgttcggccagcaaggtctccacccgccgctgctgctgcgccagctgcgccgccaaacttgcgctgcgctgttcggcccgcgttaacgaagcggccagcacgctcacttcaggcaccggcgcaacggcctgccgcaatcccttcagggcatcggccagcggccgaatatcgacgacggccggttcccgtttcggcgccgcggcggcctgagccgccgccaactgccgctccagctgacggattttctccgcctgctgttgcaaagagtgctgcaacgacgttaaacgagcgctgtctgcggccggtttggcggctggtgctgacgccgatttacgcgcggtgtcttccctaggcgcggccggtggcgcctgccgctgttcggcaaacttcaacagcgcgggaatgccgtcatcggcggcgcaagcggccccgctcgccgccaacagcaaaagccccatcgcccatccttgcgcgcatcgcttcatggctacagattctcaacccggctggacagatcggacatcagctcatgctcgacgtcagcgcagaatttctcggttttatattgataaagagcatcaatcgctttacgggtactctcatccacgttgccgcgcaccccggcatatcccgaagcgttggaaagcaggccattaaaataggcgatgcgtttttggtaactttgcggattaatattctttaatgaattaacccgctgctgacaaagcgcgatgcgttgctcatcggatttatcattaggattattctgtgagatttttttcacggaattcagttttgtcttgctcccgcccgcacagccagaaagcgccataagagacagcagaaatagggtcaaccccacccaacggcgcccgccgcaagcattaatcatcgttatcattccgtttataatcctttaattgtcacttaggtcatcattatgtggcgaacggcagcagcacatgccttaatttgattaatcaaaatgggttaggtagcaaaaaatccctatcacgcaatgcgatagaataattcactaccggtgcaattgttatttaattgttaaccaattaggtctaaacgctggctaaacgcgaataagaaaccccattccctcatgaacaaacaaccatgaaataacaataaaaacaataaattatgttttatattttgtttctaaagggaaatgcatcatctgctgcctcagagcgatattagcaaaacaatattgtgaattgtaggtgccaccctatttcccccgatctaatatctcgcatatcgttatttatatagtgatttatactggataatatttgtatacgatctattgattttaaagcaaatatatttctttttccttttggttttatattctgaatttgacttaatttaataaaatctatttccaagcaatactattatttgcaagaatattcccagcaacacgccacacgtaaaaaacgtattttatttaccagaaaatccattatcgattttccaaatctcgttatttctcataaataacggatgtcggcgtattgcccagagcaaaaggatctggctccaaccgcacgggcggcgacatggcgttgccaccgccgcgggggatttagatgtgctgttctttttatttaaaaactctctacaggaacctgagaaatgaaactgaataaattaatgctggcaaccgtgattgctttcgcttccgcatctgttgctcatgccgcatctaatcagggcagcggtaaagtcacctttaccggcgaaattatcgatgcgccatgcagcgtcgcgccggaatccgttgaccaaaccgtgccgatgggccagatcagcagccgcatcctggccaaccagggtaaatccagcatgcagcctttcaacatcgaactgaaagattgctccatctccaccatgaaaaacgtcaaagtgacctttaccggcacgcctgatccggttaacaacaaactgctggccctgagcggcacggcaaccggcgccggcatcgtgatctacgacaacctgcactccaaagaggtggaactgggcaccgcgaccgacggtcagggcctgaacgacggcgacaactcgctgaaattcgccgcttatctgcagggcagcagcgcctcaagcgccgtggtgccgggcgacttcaccagcgtggcgaacttcaccctggcttacctgtaataccccacaggggatgtctcagggcatcccccgctttattgcatgccgaggataccggcaagggaacagggaaagacagggagacgccagcatgactatccgcctttgcggcctgttgctcatcgcgctcagcgtcggcagcgcggcggcggcagcgaaaaatcagggccacggcaaagtcagcctgggcggcaccatcgttgaaacgccgtgcggcatcgccagcgacagcctggatcaaaccgtcgattttggtctgatttccatgaccgacgcctcgcaggatgggcagtcggtgctgatcggcagccgccgccatttcacgatcaaactggtgaactgcgagctggccagccaggtgaagcctgacttcatctatcgcgcggccaacgtcacgttcgacggcaccgccgacagcggggatccttccctgctcggcgtttacggcgaggcgcagggcgtggctatcgagctgttgaacgatgccggcacgccgatcccgctcggcagcacgacagcggattaccagatcgtcgccggcgacaacacgctgcgctttggcgcgcagttgcgcctgcatcccgacaaggcgcgggcgggcggcttcagctctctggccaaattcaccctgtcttatctctagcgccggcgggcgctgcacagcattacgtattcaggtcgtacggatgacctgctattgggcgcggacttgccatgagtgattatgctatgacgtcattactgacacggaaacacctacctctcctcgtcattctatctttcctctgggtgcgtccggcattttccgccacggaattcaataccgacgtcctggatatcggcgagcgcagcaaagtggatctttcgcgtttctccgatgccgactacgtcatgcccggcgcttatttgctggacatcaagatcaaccagaaaacgctgccccagcgcagcattcagtatttcccgtcgccggataacaagagcggcagccaggtgtgcctgccgcctgatctggtggaaaaaatggcgttaaaagaagaagcggccaaaaaaatcaccctgtggcacgacaaccagtgcgccgacattcgcggcatcaaaggcgcgaccgtctccgatcgtatcggcggcggcgtgctggcgatcaccatcccgcaggcgtggatgaaatactccgatcccgactggacgccgcccgagcagtgggacgacggcattcccggcctgctgctggactacaacctgagcggccagttaggcaaacagagccacaacaacaacaccgcccagaacctgagcagctacggcaccttgggcgccaacctgggcccctggcgcctgcgcgcggactaccaggccaattacaatcagcaggccggcgatcgcagcaccggtttcgactggaaccagatctacgcctaccgcgcgctgccgatgcaggccgccaagctgacgctgggcgagatctatctcgactccggggtgttcgacgcctatcgcttcaccggcctcaatctggccagcgacgagcgcatgctgccgccgaacctgcagggctacgcgccggaagtgcgcggcatcgccaagagcaacgccaagatcaccgtctcgcaggaaggccgcacgctgtacgaaaccaccgtgcccgccgggccgttcgccatccaggatctcaacagctcggtgcgcggcaagctggacgtcaaggtggaagagcaggacggcaccgtctcgaccttccaggtggataccgccaccattccgtacctgacccgcccgggctacgtgcgctacaacgtggcgctcggcaaaacctcggcctacgaccaccgcacccaggggccgctgttttccgccagcgacttctcctgggggctgagcaacgcctggtcgctgtatggtggcgcgctgctcggcggcgactataacgcctgggcgctcggcctcggccgcgatctgaacgtgttcggcgccatgtcgctggacgtcacccagtcgatcgctcgcctgcccggcgagccgaccgccagcggcatgtcgttcaagctcaactacgccaaacgcttcgacgagctgaacagccagatcactttcgccggctaccgcttctcgcaacgcaaattcatgaacatgtcgcagtatctgcaggagcgctacggcgattacgacaagaattacaacggccgtcagaaagagctgtataccatcaccgccagtaaaacctttatggcggaagacagcgccagggcgatcaccacctatctgacttactcgcaccagacctattgggacgcgcgaacccaggatcgttacgggctgtcgaccagcaagttgttcagcatcggcgatatcagcaacatcaccgcctcgctgtcggcttaccgcacctattaccagggccgcaccgacgacagcgtgatgctcaacttcaccgtaccgatcggcgatcgtcggcgcgtcggctatgcgctgcaaaccaacaacggcgacgtcacgcagaccgcgtcgtacaacgactacagcgatccggacaatacctggcaggtcagcggcggctttaaccagtccggcaaatcgctggcgcgcgggtactacacccacaacgcctcgttcggctcgctgaacgccagcgcctcttaccagcaggacagctactcgtcgatcggcggctcgttccgcggcggtctcaccgcgacccggcacggtatcgcggcgcatcagaactcgagcaacggcggcagccgcatgatgctcgacaccgacggcatcgccggcgtgccgatcaataacggccgcgcctacagcaaccgtttcgggctggcggtgatttccgacatcaccagctactacaacaccgacacccgtatcgacgtcaacaagctggcggacgacgtcgaggccactcgcgccgtggtgcaaggcacgctgaccgaaggcgccatcggctaccgccacttcgaggtggtgaaaggcagcaagctgctggccaccattcgcctcgcggacggcagcgaaccgccgttcggcgccgcggtgctgagcgagaaaggccgcgaggtcgcggtggtcaacgacggcggctcggtctatctgactggcgtacagccggaggaaaaactggatgtcgcctgggaaggccaacgccgctgccgcatcgtgatcccgggcgccgccaagccgctggaccagctgctgctgccgtgcgccaccctgtaatccgtaacgctgagaaataatgacatgaacaaacacccgataacgctactgaccgccgccggcctggccctgagcgccgtactgcccaccgccgacgcggcgatatcgctggatcgcacgcgcgccgtttatgtgagcgacgccaaatcgatcagcctgaatatcgtcaacgaaaacaaagagctgcctttcctggcgcagtcctggctggagaacgagcagcatcagaaaatcacctcgccgctggtggtgctgccgccgttgcagcgcgtggagccgagcgagcgcagcgtggtgcgcatcaccaagacgccggaagcggatcgcctgccgcaggatcgcgagtcggtgttctacttcaacctgcgcgagatcccgccaaaaagcaccaaaaccaacgtgatgcagctggcgctgcagacgcagatcaagctgttctaccggccgaaggcgattgtcgcgcccaagggtgaagtgtggcaggaaaagctggtgttccgtaaaagcggcagcgccatcaccgtcgacaacccgacgccgttttacatcaccctgaccggcatgacgcggcagacgcaaaaacagggcggcggcgcgatcggcggttttcagccgctgatgctgaagccgaaatccagcgaaagcctcaagctgcacgacaccggcatgaacagcttcgtcatcacctacatcaacgactacggcggccatccggagctgcgcttcgtctgcaatggcggcgtttgcaccgccgtgcccgagaaaaaataaggaggtccagcatggctgaattcaccgatcgactgcgccctctgctgctcggcgcactgctgtgcggcggcggcgcgctggcggcaacgccgctgggcgtgatcgaaggcaccaccggcaccgtcagctttcacggcggtctgctcagctctccctgcagcctgacgccggacagccgggatcagtccgtcgatctgggcgacgtcagcgcacgcgacttccgcaacgccggcgatcgcagcgcgccggtgcgttttcgtctctcgttccgcaattgcctgctgggcgcgcgcgcgctggcggataacccggccggcccgcgcaacggcgatgccggccgcctctacctgcagggtgagcaggccgccacgctggtgtttctcggcgaaagcgacgtcgacaacccgtcgctgctgaagctgaacggcggcgtacagggcatcggcctgcggctgcaagaccagcagggccaggcgctggagctgaatcaacgcagccacccctacattctgcagcccggcagcaacaccctgtggttcagcgccagcgtggaatccacccagcgggcggtgatggcggccgggttcgccgccgtggcgcacattcaggtgatttacctgtgaggctcgagaacgcaatgaaaactcaactgaccaaactctgcctgccgctggcgatcgcgctggcggcccccgccgcctgggccaacggctatgtcacgccggacggcgggccgaaacagttctatatcgatctgaatgaaagcaacatcaccaaccaggtggggttcaccaaactgtttccctatgatctgggcggcacctataccggcaaggtgtattgcgatacccctatccccaccagcccgcacttttacaagtcggattcggcgttgcccccctccgactacggcaacggctatttaaagctgaatgactttttggatttaaaagccgaggtgtggattgccggcaacaagaacgcgtacgtcaccgtgcctttttacaacgaatcgaatttgctgagccaacaccgctgccagccgccgtacttgcaggtcaacaactacggcagcggctccaaaggcaagatcaccttccgggtgcgcaaaaaaatcattaacggcgttgagattaacgatcggcagatcatcgagatgtacggccgcctcggctcgaccgacggcggtttcggccccaacccgatggcgcaggtgtttatccagtccgcaatcctctacgtgcccgataaatgcgtggtgaacgaaggccagttgatcaacgtggagttcggcgagatcggcggcagcgatctcaacggctcgaactacccgcaaagcattccggtgcgcttccagtgcgagggcggcagcttcgaggacggcacgctgaatatcaagctggcggtgtcgggcacggcggcctccttcagcaacgaggtattcaaaaccgacaagaacgatctcggcatccggctgacgcataacggccagctggttatcccgaatgagttttacccggtgccgaacatcggcaacggcggctcctggaacctggtggcggcgccgttcgccaacggcggcgcagagatcggcgaaggggaattcaacgcatcggccaccatcgtggcggcattccagtaaccgagggaggaacggaaaatgcgtctacgcgctttagcgctgctgagctgcgcgccctggtggtttgccgccatgccggcggcggcgaacaccgagcttatcggcgcgccggtgcagttccacggcaccgtggtgagccggccgtgcaatatcgaaccgcagtccgccgatcagctggtggagatgggcacggtgatcgtcaaaaccttgtatcgctacggccacaccacgccggtgccgttcagcatcaagctgaccgactgcaagaccacggtgttcaaatccgtcagcgtgaccttcagcggcgccgaagacggagagctgccgggcaagctggcgatcaacaacggcgcgaacggcgccgccatcgccctgtttgatcatcagggtgcggacatctctctgaataaggccaccagcgccgtcgcgctgcaaaacggccccaacaacctgaacttcaccgcctacgtacaagggcggccgagcgcgattcaaaaccaaagcattaccgaaggcgaattcacgtccgtcgccaattttgtgctggcgtaccaataagccccgcaccgccccagggaaatcaggaaaacgcccggcgcgcaatcgccggcaatgggccgtcaccgttcgctccggcgcggccttttaaggaggcacccatgccagatattcgcttcacgctgttcgacagcgataacttctaccagcaggggctgcgtctgctgctgcaggattatctgcactccctgaacgaatgccagcgccggtacccgcagttctcgccgctggcactgcaggcgttggataacatcgaaatcgtgctccgcacgccggaagagcgctggggctgcgcctgctgttaccagagcccctacggcatcccgcgccagcggcagctgactctgctgatcctcgacgacacgacccagcaacaggtgaaaaacctgccgccgctgttcagcatccatcggcgcgattcggcctacgccatccgcctcaagttgcagatggcgctggagaaatttatccagcatccgtggatggcgctgcacgccgccggcatgtggaaatgccaggcctgccgcatcgccgcgctcagccactgcgaaaaaaaagtgttggggttgatgagcagcggcatgtccgcctgcagcatcgccggcctgctgcagcgcagccagaaaaccatcagcgcccataaacgctcggcgatgcgcaagctgaacgtgcgaaaaaacagcgagctgaataaggtgctgttgaatcagcgcgggctgagttgactgacaacggactcgcgagtgccgaaagagtggtttactctgaatactcattttcgcactgcaaagcgagccggaatccatgcccagaacagccaaagtcgttgacgttcccgccctcggcgagctcgatcgccaggcgggtcagcttagccaccagctggcgcaggctctgcgccgggccattcaccggggcgatctgaaagcgggcgatctgctgccctcgacgcgccggctgtcggcggcgctggatctggcgcgcggcacggtgttggaagcctttgctcagctgacggcggaaggctttctcgaaccgcagcccggctccggcacccgggtcgcccactatcaggcgccgcgccgcacgccgcacgccacggcacaggcgagttcggcggtagcggttccgctttcttcacaggcgcagcatctggcgcgctttgccacgcaggcgcgggcgctgccgccggtgccgttcactgtgtcagtgccaatcggcgataccgcgcccgacgatatctggcggcggctcggcaaccgcatccgcgcccgcggccccggcgcgccgtcgggctacggcgatccgctgggcgcactgccgctgcgcgaagccatctgcgactatgtgcgccgttcccgctcggtaaactgtacgccgcagcaaatcctcattacctccggcacccaacaggggctgtatctggccgcgcagatcctgttggacgccggcgacagcgcctgggtcgaagatcctgcctacgccggcattaccgccattttcgatagcctgttccgcgatcggcgcatgattagggtgcccgtcgccgacgacggcatcgacgtcgccgccggcgtgcgcctggccgccaatgcccgcgccgcctttgtcacgccgtcgcatcagtatccgctgggcatgccgatgagcatggcgaaaagaagcgccctgctggcctgggccagagagcggcaagcctggatcgtggaagacgattacgacagcgagatgcgctacgccggccacccgttcccttcgctgcaggggctggcgcccgagcggacgctctatctcggcaccttcagcaaggtgctgttcccttcgctgcggctgggttacgccatcgtgccgccgccgctggtcgacgccttttgcggcgccaggatcctgatggatcgccatccacccagcgcggatcaatacgtgctggccgcctttatcgccgaagggtatctcgaccggcatatccgcaaaatgcgcggcgtctacgccgagaagcgtcgggtgctgatcgaggcgatcaacgcgtacatcccggccgagctggcggtggtgcagccctgcgatcagggcatgcacatggtgctgtggttgagaaaagatctcgacgacctgcgggtcgccctgcaggccaacgaagccgggttggcgctgcgggcggtgtcgccgatgtatgcgcccgaccacggtgagccgggcctggtgctggggttgggcggttacgccgaccgccaggtgcaacaggcggtggaacggctcggacgggtgatcctggcctgcgccggcagcggcgcctagcgggaaaaacgtttggcgccgaacacgcaaaccaccacgccggccatcacggcgatcatcatcggctggacggtctcatgcagcagccagcccgccagcgccaggccgaagaacggctgcagcagctgcaactgcccgacggcggcgatgccgccctgcgccaggccgcgataccagaaaataaacccaatccacatgctgaacaccgagacgtaaaccagcgacagccaggcagcgccgctgaccacgggccaggcggccggtgccgccagccaggtggccgccagcgtcaacggcaaggcgaccaccagcgcccaggagatcgcctgccagccgccgatccggcgcgacagcaccgccccttcggcataacccaggccgcacagcaacaccgccccgaccatcagcgcatccccttgccaggcgccgccgctcccctggctcaacgcgaaagcgcccaccaacacggcgccgacgcctgaaaaagcccaaaaagcgggcttgggccgctctccgccgcgcaaaacgccaaaaccggcggtcgccagcggcagcaggccgatatacaccagcgaatgcgccgacgtggtgtgctgcagcgccagcgccgtcagcagcggaaaaccgatgactacgccaagcgccacaaacagcagcggcggcaaatcggcccgcgtcggccgcgcctgccgggtgatcaacagcgcacacagggccagcaaagcggcgatcgccgccctgaccgccgtcagaaacagcggatcgagctccagcaccgccacccgggtggcgggcaacgagccgctgaagatcatcatgccaagaaaaccgttcatccagccctgggccgaatgcccggcggcgggatgtgcaggggtaacaacgagagtttttgcagactgactgtccgtcatgtgaacgctccgcacgcctgaggcataccgaaatcggcaacccgcgaggcgatgtcatagtgaaagagaacatcgttgcccggcgtcgtttgccggggctgcgttctatttttcagataaagcggttcacagacaggtccagatagtgaaattttcactgtgccggttagcaaagcgcgccgctaacgccaaagaagggcgtttttcgggctgtccttggccgtttggcggccctgcctgcggggtatcatggacttttatgcgtttttgtagaacaggacaaggtgcggcgccgtggtgaaacccttcttacgcagtggcagtttggatgacgtgctggctttaggcgagaacgggcaaccggtctacgcctgcgcgcagcagttgcgggaaaccctgcgccttcgccggcagcagcaggccgccgactgtctggcgatcccccagccgaacgaaagcggcacccgcatcgactggtatgcgcccttccccggcaaagtcacctcctggctggcggcgagcgatgcccagcgcgcgcaggcggtacggcacctggaacactgcctggcgaccttccgcagcctgacggaacaggccctggcgaccgatcaccccagccatcgcctgttcggcgcgctgctggccaaagcgatgcacatacccgaccccaaccacgtttacctggtggacgatcggccggtgctgaccttctggggctttatcaagccgcaggcgcagagcccggacgatccgttggcctgcctgcgtccgatcgaatcggaagtggaaaaaccggcgccgatcgctgccgctccgcgcaaaccggccgttgtcgaaccggtaaagccggccccggccgccgagcctgaaccggtgcccgctccggcggcgcccgtcgaatcccccaccgttgttcgcccacatcggcgccacgcgctgtggctgttgccggtactgctgctaggcagcgcggcgctggccgcctggctgcaccgctcaccgtcgccgcaaccggcgatgccggctgaggtgcgccatccggcgccgccggaaaaaaccgccgcgccgttgcctaagctgcgcttgccgctggcgcacgccacgctgatgccgccgcccccagccccggtcatcccgcagccggcggacaaaaatgcgctggtgctgccgcccgaggcggtgaaggccggctccacccgtttccttaacggcaaatggcgcgccacggtggcgctgaaagatccgattaccggcaagcgccccggtctgcaataccgcctgaacgcaggcaaaggcagcgctgtcatcgcctacggcgacggcgtcagctgccgggtggcggtcgaggccgggctgatgcagtccggcaatctggtgatcaacagccgcaccaaggcgcgctgcagcgacggcagccgctaccagatcccggaaatcgtctgccgccagggcgagaccggggccgcggaatgcaccggccgctacgatgcggacaccacctatcccatgacgttcaagcgcgagagtaaatgatgctggcaccccttacggactacaaacacggcattacgctgattcaggacagcggcattcagtttatggactttgccctgacgccgcggctggacgccgagtttcccggcaaattcgtgcgcaagaccgccagcggcccgctgctgcgcctgcaatgggaggccgagagcggcaaatatcagctgccggccgagggtgggcaagccgccgaagtggtgcggccggagttcagctacccgctgcagcagtcgctgcgcctgctggataagctctggctgccgctgcccttcttgcgccacaccccggcgggcctgtttttgtcgggcccggacaactgggcgcgcctgcaggtggtgcagctggatgaaccggatcaggacggcaacctgctgcgcgtggtgctggccttcgacactcgcaccgccgcgcccggccaggaggcgctggcgccgggcgaaagcgatctcggcgccgatctgagcttcgcgctggcgcaccgcaaccacgagctgggcgaatttctcgatctgacctgggtggacggctggctgcgcgaggcgttcagccagcgcgccgccgagcgggagcagcgcgccgaagtggagatcaacgccgggctgaaaaccttcgagtatcaggcgcactacctcaacctgctgcacatgctcggccaccagctggcggtgccgcagataaaaatggcggcggcgacgctgcagcaaccggcgatcgacgtcgatctggtgctggacgtcggtaactcgcacacctgtggcgtgctggtcgaagaccacccggaagagagcaacggcctgaagcaaacctacgagctgcagctgcgttcgctgtccgaaccgcaccgcgtctacaacgaactgttcgagagccgggtggagttttctcaggccagcttcggcaagccgcatctgtcgttccagagcgggcgcgacgacgccttccagtggccgtccatcacccgcgtcggccgtgaagccgcgcaattggcgcagcgacgcgaagggcatgaaggcaccaccggcatctccagcccgcgccgctatctgtgggacgaagagcgctatgcgcccggctggcgcttcaacgagcggcacgagccgatggccgccgccgcgccgttgaccaccctgatcaacgacgaaggcgtgccgctgtccaccctgccgacggccgaacggctgccggtgttcgccgcccattacagccgcagcgcggtgatgagcctgatgctgagcgagctgttggcgcaggcgctgatgcagatcaacagcatcgcccagcgcagccgcatgccgaacgccgccgccccgcgccgtttacgcgccatcatcctgacgctgccttcggcgatgccgaagccggagcgcgagatcttccgccgccgcatgcaggaagcgatcgggctggtgtggaaagccctcggctggcacccgcaggatgcgccgttcgacggcgcgcacactcgcttcccggcgccgcaggtgcagatcgagtgggacgaagccacctgcggccagatggtctatctgtacaacgaaacccaggtgaacttcgccggccgcaccgacgcctttttcgccgccatggcccggctcgaccggccgttggcgccaggtgagcaggcgggaaaaacgctgcgtatcgcctccatcgacatcggcgggggcaccacggatctggcgatcacgcactattcgctcgacgacggcgtgggcaacaacatcaaaatcaacccgcgcctgctgttccgcgagggctttaaagtcgccggcgacgatatcctgctggacatcatccagcagtttgtcctgcccgccgtgcagcaggcattcgaaaccgccggcgtgagcgccgccccggcgctgatggacaggctgttcggcaacgaagggcgcatggacgggctttccaccctgcgtcagcaggccgcgctgcagatcttcatgcccgccggacgcgcgctgctcggcgcctatgaagaatacgacccgctggacaaccgggcggaaatcgccgccagcctgggcgatctgctgccgcagccgccgacgccgcaggtgctggcgtttatcaacggcgaagtgcagcgcgaagccgacagcaacgccttcgatatcctgcacaccccgctggtgatccgcctggccgatctgcacgccgctttcttgtccgatcgcatcggcatcggccgctgtctgcgcctgctggccgaagtggtggcgctgtatacctgcgacgtactgctgctgaccggccgcccggcgcgcttccccggcgtgcaggcgctgctgcgccatctgcagccgctgcccgccagccgcattctgccgctcgaggggtatcacacccgcagctggtacccgttcaacaaacgcggccgcatcgacaacccgaaatccaccgcagcggtgggcgccatgctgtgcctgctggcgatcgatctgcggctggagagcttttacttcaacgtcggcgatttccagccctactccaccattcgctatctgggcatgctggacggtaacaacatgctggcggacgataacgtctattaccgcgacatcgatctggatcgcgccgatttcgcgctcgatcccgccggcagcttccagctgcgcggcccgctgcgtctggggttccgccaattggacaacgaacgctggccggcctcgccactctatacgctgaccatcaatgatgcccagctggcgcgcaaactggccggcgatgcggtgatcagcctgcggctggccatcaccgccagcgccgagcagggcgccgagagcgtcaagatcgcgcaggcgctgctggccgacggcagccccgtcccggcgcaccacctgcaactgaaactcaataccctggctgccagcgcctccggtgcgacccactactggatagacagcgggagcatttacccacgatgaacacacaaaccttcgccccagcggccccgaataacgcgctcagcgccggcatattgcaggcgatcgactgggtggacgccgcgcgccgccaatcccctcgcctggagcgggaggccgatcgcctgatacagcgtctgcgccgttgccataaccgcgccgcacggttggaaaacacatgccctgcgcaggtcgccatcggtttgtatggccacaacgccgccgccaaggcccatttgctggcggcgctggcgcctggcgcaaagcgcttcaacgcggacctttcgctcgcggtgcgctactgcacggcggccgaggcggggcccgccgagtatccgatcgccctcgccctgctcaatgaagcgcagtggctggccatcacgctcgatgccgccgcgatgggcggcttccggctggactgggacgcccgcgcgatcgccggccatctgcaaacgttggcgcgccaccgccaagccatcgcccccgacgccctcagcgacggcgatgtgctggcgctgtgggatagccaacgccgccacggcgacaagggacaacagacgctggacaggcatttctggccgcaggccgtggcgctggcgccgcagctgagcatcgacgatcgcgcgcgcctgtttgcgccgctgtggggagaggaaccgacgctgacgacgcattatcgccagctggcacacacgctgcatgccctcggtgacagccggcaggttcatgccccgcgccgcgccttgacgctgctgaccgcgagcgccgcaccggaaaacacggcaatcgtcgtgatggccgaacacggcggtgaacgggagatcgcgctgagcgatctggtctggttgaccgccgaagtcaccaccgttctgccgcaaaccgcgcaggcgggcctgcccgccgacgtggcgctgatcgacctgcccggcagctgcgcccgcccgcaggcggaaccgacgcagcggctgcaacaggcgaaacgcgcccatttgctggcccgctgcgcggacggcctgcacgccaacctgctgctggtggccgatgccgccgccacgccgcaggacgccgcgcgcatcggccaggcgctcgccggttgggtcgaccacacccagggggaaaccccggcgctgcgccagcgccgcaaacccggtttaatctgggcgatcacgccgttcgacccacgccaggaaggcaaaccgcgccctgacgacgccgttcagcgccaggtcggcgaacccggtgacagctgggccacactgctggcgctggatgagcaggattgccgccgcatggtgaactacctggccgcacaggcgcgcccggcccacaagcaagcgcgcctgctcgagctgcgcgaagagttgcagcgcgagctgacggaaagcctgctcggcaactggctcaccgccgccgatccatacgcgacccagcaacgcgcccaacagctgctgcgcgcgctgcaggcgcaggccggccgccacggcgaactgctggaacgattgttgccccagcgcgatacgctgcgccaactttaccagcaacagcagcacgccgtgccgaccccggcgacgcctgcgccgttcgggctcgacatcgatctgttcggcgcaccggaaaccccggcgcccggcgagccccccacgtcaccctttgccacgcggatattcgcggattggatcaaccatctgcgcagcctgccggacagccgccggttgctggatctgctcggcgtcgacaaaccgcatctcgaactgctggttgatgcgttgatcggcgccgcctgccgccagcggctcgatgatgagctggagcgcgcgctgtgcgccggcggcctgccggaacagggggaagatcggcagatcagccaggcgttggcgctgttgggcgacttcgtcgcctggctcggcttccagcggcgcgatgcggcaacgcgccccgagagccgcgtcaatcccggccaaccgatctttaccccgccgccgcagccggcggtggactggagcggccagcagcggctcactcggctggcgccgacgccaaccaaaagtaccgcattttatatctatgactggctgatcggcctgcagaccctgctggcggaaaatgccgcgcaggcgcagccggcgctggcagacgagcaacgcgccgacctggcggcgatcgtcgccgccctgcgcgctgcgccgtagcgggcgccatccgggccggacgccgccgcgcagtcagtggcaggccggcccggccgacatcacttcgcggaaatgggtgaccagcgggcgcaggttggccttgtgccacacggcccacagctgcgtggtgtattgcatccagggcagctcgcgcaacaccacgccttgcggcgcgttatgccgcaggctgtgctggatcaacgtcatccccaacccggcggcgaccagccccaacgcagtcagcggctcgcccgcctccagccgaatatccggatcgaacccggccttcacgcaggccgccacgaagtcgtcgcgcgaatgggcatcctctttgtggatcaccgagatccaggcctgatcggtgagatccgccggctgcagcgtttccctgtccgccagcggatgcgtctgcggcagggccagcaacatgcgatcgtccaacacctgcgtatagtccaaatcctgatcgtcgcgatccggcgccgtattgaccagcgccacgtccaggctacgctgccgcagcccttccagctgcatggaagaaggctggctgtaaagcacgatgtgcacatccggccgggacacccgcagcgaccgcaaggcgttcgacaagacgccggagtgcatcgcattttcgatatagccaatgcacagcccgccgtcttccccgcgccccagacggcgcccaagcgactcgagccgggtggcgtgcgtcaacagcgcgcgggtttctgccagaaacgtctggccgtcggcggtcaggcggatgcgctgctgattgcgttcgaacagcatcaatccgaggcgctcctcaagctgggaaatctgccggctcagcggtgactgggaaatgtgcagccgttcggcggcgcggccgacgtgctcttcttccgccaccgccacaaagtatttcaactgacgtaaatcgatcatgtgagacctcaaaggacttaacttagacaaattatgtcctatcaagtcacaacttgccaagttatctttagcctcgtgacggggcagacgctgtatgagccccactagtttccctgaaaagataacgaattgaggattcaccatgagcatcaaaaatattttacccggcaagatcggtttgggcggcgcgccgctcggcaatatgttccgcgccattccagaagaagaagcgctggctaccgtaaccagcgcctgggacttgggcatccgctacttcgacaccgcaccgctttacggttccggcctgtcggaaattcgcatgggcgaagcgctctctcagtacccacgcgatgagttcgtgctgagcaccaaagtgggccgcatcatgctggacgaaatggaagatcccgccgctcgcgatctgggtgagaaaggcggcctgttcgaacacggtttgaaaaacaagatcctgaacgactactcggaagacggcacgcttcgctccattgaacacagcctgaagcgtcttaaaaccgaccgtctggatatcgtctggatccacgacgtcgctcaggatttctacggcgacagctggctggaacagttcaatatcgcccgtaccggcgccttccgcgcactgtcccgcctgcgtgacgaaggcgtgatcaaagcctggggcctcggggtcaaccgcgtcgagccttgcgaactgacgctggcgcttgatgagccgaaaccggatgccttcctgctggccggccgctacagcctgctggatcacgaacgcgccctgcaacgcctgatgccggaagcgctggaacagaatgtcgatatcgtcgtcggcggcccatacagctccggcgtgctggccggcggcgaacatttcgaatatcagaaagcgtccccggctattcgccagcaagtcgcgaaaatcaaagagatcgccgctcgcttccaggtagacgtcaaagccgctgcgctgcaattcgcgctggctaacccggccgtcgccgccgtgatccccggttcgagccgtcctggccgcatggccgaagatctggctgcgctggatgcagtgatcccggctgagttctgggcggagatgcgccgtcagaaactggtggccgacaacgcgccgctgccgattcgttaagttttatggggccgcaccccggccccattacccacatgacagagtgatatacatgatgaaactggatctttcaggcaaagtcgccgtcgtcagcggctccacctccggcatcggtctcggcatcgcgcgcgggcttgccaaaacgggcgccaccgtggtgatcgtcggccgtcagaaagccggggtcgataacgccatcgccgacatcagcgccaacgtgcccggcgcgcaggtacgcggcgtggtcgccgatctcggcaccgaacaaggggctgcaaccctgttcgccgcggagcctaaagccgacgtgctggtcaacaacctcggtattttcaacgataaagacttctttaccgtgcccgacagcgagtggatgcacttctataacgtcaacgtcctctcgggcgtgcgtctggcgcgccactacgcgcagagcatgaccgaacagggctggggacgcattattttcgtgtcgtccgaatccggcgtcgccatcccggcggatatgatcaactacggcgtgaccaaaagcgccaacctagcggtatctcacggcctggcgaaacgcctcgccggcaccggcgtgacggtcaacgccatcctgccagggccaacctttaccgaaggcctgcaggagatgctggcggaagcggcggccaaatccgggcgcagcgcgcgcgatcaggccgacgagttcgtaaaaaccgaacgcccaagctccatcattcaacgcgcggcggacgtcgatgaagtggccaacctggccgtttaccttgcgtctccgctgtcttcggccactaccggcgcggcgctgcgcgtcgacggcggcgtcgtcgacaccctggcaatgtaattccgtaccctaaaccgatatcaagagagaaagaaaatggctactacatccgtatctatgaacatcccggcatccgccgataccgtatggcaactgatcggcggcttcgacgccctgcctgactggctgccgttcattccgaaaagcgtcgtttctgaaggcggccgcgtgcgcactttgacgacctctgacggcggcaccgttatcgagcggctggaagcgttcgacaaccgtcaacgcagctacagctactccatcatgcaggcgccgttcccggtggtgaattacctgtccaccctgtcggtacacaccaccgacgacgccaacgtggcgcgcgtggagtggtcgggcagcttcacgccggtcaatatcagcgacgacgaagccgtcgccctgttccatggcatctaccaggatggcctggatgcgctgagcggcaacttcccgcgctaatgcgtgaacactccgcacgcttatggccgatggtgaaaaccatcggccatttttttgctttagctctggagcaggataaatccgccagcgccgtttatgctgtaaaggagacttccgtttgaggagatggccgtgcgccctttcagcctgaagactatcgaccatgtggtgctgcgcgtgcgcgatatgcagaaaagcctgcatttttatacccggatcgtcggctgtgatatcgccaaacagcggccggatttggggctgatgcacctgcgcgccggagcggccatgatcgatctggtggatattaacggcgtgttggggaaaaaaggcggcacggcgcccgatcctcaccggcaaaatgtcgatcacatctgcctgcgcatcgatcctttcaacgaggacgagctgttagcctatctgcgatcgcaggggatcggcgttgatcccgccgaatcgcgctatggcgctgaaggcgacggcccgtccatttatttcagcgatccggacggcaatcgcgtggaattgaaggggccggcgatcggctagatcctggcgctcccgttgatgtcggacagccgttggcgatccgtcacccgcagtgatttgtttttaaattgaatgatgccgtccgccgcgagctgcgccagcgcgcggctcagctgtctgacggagatgcccaatctcgccgccagcgcctcccggttttccagctcaatcaattccccttcgttctttatcttgaataataaaaattttcgcagtttatactccgccgtaaaaacgccgttcgcatgcagcaaagaggcattcagcagcttattgctcaattgccggcagataaaggtgaggaacgccgggtcgctcagggcgtgattgttgatggcctctatcggtgccgcgaggagcagcgcgtcggtcaccgcctgcacggtgctgaacaacgtgcgctgcgcctgggagaacagctccagatcgccaatcaccgagaaatccgtttcgaaggaaaagacaatgtgcgcgccattcacatcaaaattctcaatctgcaattttccctgcacgagaaaaaacaggtgggtcaaacgatcgctttgcgtcaccaggtattcgccggcttcgacgctgaccaggcgcagtgcggcgagcagcgtgggcgaaagcgccgttcgcagatcgtgagcgtcgataaaagcttcttttagcttgctgtcaccgaccgttttcaaggcgattcactcccagggctcatccttaaacgtcttacatcctcgctttcgactgcgttcagcatagccgacgcgcttcagaacgaaaaaggacatctgaccttttttgccttaggtcgtctgggtactttctccgcatagcccacccgaggagatggccatgcgacatattttgatagataccgatactgcttccgacgatgccgtcgcgctgctgatggcgttgcgcgcacccgacgtgaaggtggaagcgatcaccaccgtcgcgggaaactgcccgcttgaacagtgcgtcaaaaatgcacttatctgcgtggaaaaagcgggaacctatgcgcccccggtttatgccggcatggcgaaaccgcttttgcgaacgcgttatcattcgcaccatattcacggcgaagacggcatgggcgacatggccttgcccgatccgcgccagagcgccgaacccgttcatgccgtggacgccatcatcgactgcgccgcacggctcaatggcgagctggaaatcgtcaccctcgggccgttgaccaatctcgcgatggcggtgctgaaagcgcccacgctggccgaaaaagtgaagagggtttatgtgatgggcggttccgggctgatgcccggcaatatcaccccgctggccgaatttaatttttatgccgatgccgaggccgcgcatctggtgctcactgccgggctgccgctcaccctcgttggctgggagatcggcatgggggaagcatttatcaacgaacgcgatatagagcgattgaataatctcggcgaactggggcgctttgccgtgcgctgcaatcgcacgctgatggcgttcaacgccatgcgcaccgaacgtaaaggctttgatttgcccgatccgaccaccatggcggtggcgctctacccggacatcgtcgaaaccagtctggaggcgtattcctgggttgaatataaaagtgaaaggtcttacggccattacgtcatcgattccacccacctgaccggcgaaccggccaatgcgtgcgtgatcacccgcatcaaacccggcctgtttaaagaaaaactgttttcgttgttatctcagccgttaatgaaataagtggcccgtatgaaattcgatccaagaaaattgaagaaagtggaattacacgtccatttggatacctgtttaagctaccactatgtcaaaaaggtcgacccgcaaataaccagagcggcatttaatcggcaatttatcgcgccgaagcgatgcgccgatctggggaactttttaagcaagatagcgccgcaaatagatctattacagacacgccaggcgataacgctggccgtcgaggacttattcgcgcagttggcggcggataatgtcatctatgccgagctgcgcttcgcgccgctgctgcatacccggctgggattaaccggcgaagcggtggtcgagacggtgctggcggccatgcatcacgcatcacgggcttacggcatcgccgccgggctgatcctgtgtacgctgcgacatttcgacgcggccgccagcctgcaaacggcgaaactggttatcgattatcagggaagcggcgtggtggcgctggatttggccgccgatgaagcgcgttacccgctgacccaccatgtggcggcctttcgcgccgtgcgagcagccggcggcaacgtcatcgcccacgccggtgaggcgaagggcgccgacagcgtacgggaaacgctggagcagctacaggtgtcgcgcatcggccacggcgtcagaagcatcgaggatgctgcccttatcgagcgtctgatagccaccggcgtcctgctcgagatctgccccagctgcaatctcgtctgcaatctgttcgacagcatcgacgatcatccgatagatcggctgaaaaggatgggagtgcggctgaacgtgaataccgatgcgcgcaccgtcgccgacaccacgctgaacaaggagtatcagctgttgcatgacgccttcggctggcaggatgacgattttaaccgcagcaaccgacaggcgctggaggcgagttttctcgacggcaacactaaaatgaaattaatgaatcagctcaaggccgggccaatgtgacccggcgcatgtcaaggctgcgcgggttttaacgcccctgcgccgccagcgcctgggcgcaggcccaggccgaactccaggcccactggaagttgtagccacccagccacccggtcacgtccaccacttcgccgatgaaatagagccccggcaccttgtgggcctccatcgtcttggaagaaagttcgttggtgtcaacgccgccgagcgtcacttccgccgtgcggtagccttcggtgccgttcggctgcacgcgccagttctgcaacagatccaccagcgccgcttgttgcggcgcattcagctgcttcagcgtcgcctccggcagttgtcccagggtctgcaagcactccaccagccgcttcggcaaatgcagcgccagggtgtttttcaggctttggttcgggtgctcttggcgttggttatccaggaagcccgccagatccagctcaggaagtaagttaacgctcacatactcacccggctgccagtagctggacagctgcaataccgccgggccggagagaccgcgatgggtgaacaggatgctttcacggaagctgacgccgttctcggcggtgatcaccgccggcaccgacacgccggacagcgcctgcacatgctccagcagcggcttatgcagggtaaaaggcaccagcccggcgcgcgtcggcagcaccctgaggccgaactgctccgccagtttgtaaccgaacggcgaggcgcccaaccccggcatggataatccgccgctggccaccacaagtgagcgggcacttactttttcgccattgagcgccagctggtagccgttctcggttttctccacgcccagcacttcgctgcgcaggcgcatcgtcacctggcccagctcgcactctttgaccagcagatccaccacctgctgcgccgaatcgtcgcagaacagctgccccagcgttttttcatggtaggcgatgccgtagcggttgatcagatcgatgaagtcccactgggtgtagcgcgccagcgccgacttgcagaagtgcgggttgttcgacagataggccgccggttcggcgtacatgttggtaaagttgcagcgcccgccgccggacatcaggatcttgcggcccggttttttgccgttgtcgagcagcaacacgcggcaaccgagttgccccgcctgcgcggcgcaaaacatgccggcggcacccgccccaatcactacgacatcaaactgttccacctgagcctcacttatcaaaaccacaatcgcgacaaaagagcgccatattacgccgtttcgccgccggtcaccgccaaattcacggcggcagattgtaaagccccggcgccgccaacgccacagtaagaaaatattacagaggtcagaggagaataacgcgttgatattcaatatttttgttataggcgcgtcatcgtttcgtcatgtccaaatcaaaaaaacgtcatattttccttttccccggccccggttgtcactgataatgcgcggcgttcatgtccacaaactggcgtaacgcttatgctgcatttgttcgctggcctggatttccataccggcctgatgttaattctcgcattgttgttcgtgttgttttatgaagccatcaacggttttcatgatacggccaatgcggtcgctacagttatttatacccgcgccatgcgctcgcaacttgcggtcgtgatggcaggtttgttcaactttcttggcgtaatgctcggcggtttgagtgttgcttacgccatcgtccacttgctgcctaccgatctgttgttgaacgtcagttcagcacacggattagccatggtcttctccatgctgttggcggcaatcatctggaacctcggcacctggtatttcggtctgccggcctccagttcccatacgctgataggcgcaatcatcggtgtcggtttaaccaacgccctgatgacccacacttcggtggtggatgcgcttaacgtcccgaaaatgattggcattttcctttctctgctgttctcgccgctggtcggcatgatggtggcgggagtgatggtgttcgccttgcgccgctattggagtggcaccaagaaacgccagcgtatccacatgacccctgcggaacgtgaaaaggtcgacggcaaacgcaagccgccgttctggacccgtatcgcgctgatcctgtcggcgattggcgtcagcttctcgcacggcgccaacgacggccagaaaggcatcggccttatcatgctggtgttgatcggcgttgcgccggccggcttcgtggtcaatatgaatgcaaccggttatgacatcacccgtacgcgtgacgccgtgacccacctgcagcaatattaccagcagcacggcgacgcgctgtcgcatgcggtgtcgctgacgccgctggtgccaagcccggatgacgaagctgcgtctggcaaaccggccgagttccactgtgacagttcgcgcgccatgccggcgatcgagctggctcagggcatgctgaccaacctgcaaagctacgatcagctgacggttgaccagcgcagccacctgcgccgcctgctgatgtgcgtgaccgacacggcggataaagtcgccaagctgccggaaacctcatccgccgaccagcgcttcctgaagaacctgcgtcaggatctgctgcagaccgtcgagtacgcgccgatgtggatcatcgtcgccgtcgcgctggcgctgtcgctcggtaccatggtgggctggaaacgcgtggccaccaccatcggcgagaagatcggcaagaaaggcatgacctacgcccagggcgtatcggcccagatgaccgcggcgctgtcgatcggcgtggcgagctataccggcatgccggtctccaccacccacgtcctctcttcggcggttgccgggacgatgatcgtggacggcggcggcgtgcagagcaaaaccgtgaagaacatcctgttggcctgggtactgaccctgccaatctcgattctgctttccggtgcgctgtattggattgcgttgaagctgatctaagcgataagcatcatgaggaaggcggccgcagggccgccttttttttgcctgcatcaagggaaacagaaaggcattaataccaaatcatcatcgctatcaggcagatgaccaccaggccgcacagggccgaggtcagcataaactgcccgcgcacccgctcacagcggcgaataaactccggatcgtggtgttcgacatagcgctgcgcaaagatatagcgcaccagcctcagctgcttgctgggttggccgtgggcggtgaagaagccgccgccgtcgacgtattggtacagcagcgggtcacagccgcgcaataccaccagcagcgcgcgcagagaagagtaataccgcaccatgtttaccacacacaccacacataaggcccaaaacagcgcgacggtactgatcatgattgccccctcaaggcgttgttatccgcggccatccgccgggtccaaccgccctacctcattacccgatactctgctggagcttaccgctctcatcccctttttttgcctgcacgggccacgcccataacccaccgcctccgaagacgttgccgcaccgcacgatgagatttgcacggcatggttctactcagaggagaaatgatgaggcccatatccatcattgtaggttaatgaaacgcaaactggcctgagcagtggataaaatttaccgccctgtaccgaaaagtcacctgccggggcgttataagcgataaccgtccgtttcgattatgtcgcttttctggatagtctatcccgcgccacgccgctgatctttccccccacgctggctagactcaggtttccgttacgctcatccaaggaaactgttatggcaaaccattcaatcaagggaaaaaccgtcctcatcgccggcggcgccaaaaacctcggcgggctgatcgcgcgcgatttggctgaacaaggcgccaaagcggtggtgatccactacaacagcgccgcttccaaagccgaagcggagaaaaccgtcgccgccattcaggccgccggggcgcaaggtgtcgcgctgcaggccgatctgaccaccgcaggcgcggtcgagaagctgttcgccgatgcggtcgccgccgtcggcaagccggatatcgccatcaataccgtcggcaaggtgctgaaaaagccgctgatcgacatcagcgaagccgagtacgacgagatgacggcggtcaacgccaaaaccgcgttcttcttcctgaaagaagcgggtaagcaccttaacgacaacggcaaaatctgcacgctggtcacctcgctgctcggcgccttcacgccgttctacgccgcttacgccggcaccaaagcgccggtggagcacttcacccgcgccgccgccaaggagttcggcgagcgcggcatctccgtgacggcggtcggccccggcccgatggataccccgttcttctacccggcagagggtgcggacgccgtggcctaccacaaaacggcggcggcgctgtcgccgttcagccaaaccggcctgaccgatatcgaagacgtggtgccgttcatccgccatctggtcagcgacggctggtgggtaaccggccaaaccatcctgatcaacggcggctacaccaccaaatagttcgacgggggcagagaggcccccgcacctgctcgcacgcaaccgcgccatgcggctacactctactgtcagaaacggcgccaaggaacagcagatcagcgagatggacagattcaatcaataccgcgtattcgtacaggtggcggaaatgggcagctttatccgagcggcccatgcgctggaggtgccgcgcgcctcggtctccgccgccgtgcagcaattggaaacgcagctgggcgtgcgcctgctgcaccgcaccacgcggcaggtgcggctgaccgccgacggcgaacagctgctcgagcggctgcgcccgctgctggccgaagtggaagacatcgatcagtcatttcaggccagccaacggcaggcctccggacggctcagcgtcgacgtgccgagccgcatcgcccgccggctgatcgctccggcgctgcccggcttgctgcggcgccatcctcacctgcagctggtgctcggctccgccgatcgcgccatcgatctggtgcaggagggggtcgactgcgcggtgcgcgtcggcgatctgcacgacagcagcctggtgatgcgcccgctcggccatatcgcgctgatcaactgcgccagccccgcctacctgagcgaattcggtcatccgctccaccccggcgatcttgccgaggggcactggagcatcggctacgcctcacccaggaccggccgcgaatccccctgggaatacctgaccggcgacggccatacgcaacggctcgaactacccagccgggtggtggtcaacaacgccgaaagctatatcgcctgctgccgcgccgggctggggctgatgcaaatcccgcgctacgacgtacaacacctgctcgacgccggtgaactggtggaagtcctgcccggttaccgcgccgcctccatgccgatcgccctgatctacccccatcgccgccagcgttcccgccgtttggcggtgtttcatgagtggtttgaaagcctgttgcagccgcatctggagcgctgattgcacatttagcgctatactttgtttaataacgcttataattcaagcggtcagaccgttaaaacccgcataacccataggcttttacgccacgcgggtgtacaacaaaaggtatcgtgcgcagagattttcgatgcggcgcagtgtgatcgccccaacatatcattgcgttatccgaatgatactatggaaccaacagcgccaggcgggtacacggaacgcctgctaaccctttttaatcggcatgtttatggaaggagtattcttatggcttacaaacacatattgatcgcggtagacctatccccggaaagcaagatcctggtagaaaaagccgtctctatggcgcggccgtataacgccaaagtttctctgatccacgtcgatgtcaactattccgatctctataccggccttatcgacgtcaatctcggcgacatgcaaaagcgcatctctgaagaaacccaccaggcactgaccgagctgtcgcaaaacgccggctaccctatcaccgagaccctgagcggcagtggcgatctggcgcaggtgctggtggacgccatcaagaaatacgacatggatctggtgctgtgcggccaccaccaggacttctggagcaaactgatgtcttccgctcgccagctgatcaataccgtgcacatcgatatgctgatcgtgccgctgcgcgatgaagaagacgaataaagtaagcgcttgctaacttaactaaccaacgcccgcgccctgcgggcgtttttcatgccgccacgccgattaatcgcttgataatcaaccgccctccgatgatatagtcgctaaagacacaacatcctcccccgagcatcacctatacccaaatctataagaaatagcgggggaaatttaatgcgaaaaggagttatccatggaatatgccgtatcggtagagtctttcctgtcctcgttacaacgccataacccccaccagccggaatatctgcaggcggtgcgcgaagtgttcacctcgctgtggccgtttatcgagcgcaacccgcgctatcgcgaacaggcgctgctggagcgcctggtggagcccgagcgcgtcattcagttccgcgtcagctgggtggacgatcgcggccaggtgcaggtcaaccgcgccttccgcgtgcagttcaactcggccatcggcccctacaagggcggcatgcgcttccacccgtcggtaaacctgtcgatcctgaagttcctcggctttgagcagaccttcaagaatgcgctgaccaccctgccgatgggcggcggcaaaggcggctccgatttcgatcccaagggcaaaagccagggcgagatcatgcgcttctgccaggcgctgatgaccgagctgtatcgccacttgggcccggacaccgacgtgccggccggcgacatcggcgtcggcggccgtgaagtcggctttatggccggcatgatgaaaaaactgtccaacaacaccgcctgcgtgtttaccggcaagggcctctccttcggcggcagcctgatccgccccgaggcgaccggctacggcctggtgtactttaccgacgccatgctgcagcgccacggcctgggctttgagggcatgcgggtggcggtatccggctccggcaacgtggcgcagtacaccatcgagaaagcgctggagctggacgcacgcgtgatcaccgtatcggattccggcggcactctggtggacgaagacggcttcaccaccgagaagctggcgcacctggcggagatcaaaaaccagcgctacggccgggtggcggactacgcccgcgaacgcggcctgacctacctggcgggccagcagccgtggaacgtgccggtggatatcgccctgccgtgcgccacccagaacgagctggatctcgaggcggcgcagacgctgatccgcaacggggtgaaagcggtggcggaaggagccaacatgccgaccaccatccaggccaccgacgccttcctcgacgccggggtgctgttcgcgcccggcaaggcggccaacgccggcggcgtggccacctcggggctggagatggcgcaaaacgccgcgcgcatcggctggcgggcggaaaaagtggatgtacgtttacaacatatcatggcggatattcaccatgcctgcgtggaatacggcggcgagggcaagcaaacccactatgtgcacggcgcgaatatcgccggtttcgtcaaggttgcagaggcgatgctggcccagggcgtgctgtaatcgggcgcaaaggtgatcttgttcacacatcggttaaatgcttcaatgccggcctctgcgccggcatttttttccgcgtccaagccatcaaaatgatgcgcacacgttaattaaaagttaataaaaagttatttacagccgtttggttggtagtaaatttaccaccgccaaataattaaacatttatttaacactaaatacgccaatattttacttaaatgtgcgcagatcacatttcgttaacttcggctacgccccctcttccattcctttgtaatctgcagcggtggaaaaaccgccacccctacagataaaaaaaggtacagctaatgaaatttaacctcgcattattaaatgcatgtgtggtttctgcgtgcatgttatcgacaacacctgtgttcgccgctgataaatatgagattgccgtggtcgccaaagtgaccggcattccatggttcaaccgcatggaagtgggcgtcaacgaagcggcgaaaaaactcgacgtcaacgcttaccagaccggcccgtctacgccggatccggccgcgcaggtcaaggtgattgaggatctgatcgccaagaacgtcaacgccatcatcgtggtgccgaacgacgccaaggtgctggagccggtgctgaaaaaagcgcgtgacaaaggcatcgtggtgctgacccatgaatccccggaccaacagatcggccagtgggacatcgagaccatcgacagcgagaaatacgcgcagaccaacgtcgatgaactggcgaaagacatgggcggcaaaggcggctacgcgatctacgtcggctcgctgaccgtgccgctgcacaacgcctgggccgattccgccatcaagtaccagaaagaaaaatacccggacatgtttgaagtcacctcgcgcttgccggtggcggaaagcatcgacaaatcctatgccaccacgctggatctgatgaaaacctatccgcagatgaagggcatcatcggctttggttcgctcggcccgatcggcgccggccaggcggtggccaagaagcgcgccaaggacaaaatcgcggtggtgggcatcgccatgccggcgcaggccgccccttacctgatgcgcggcgacatcaagaaagcgctgctgtgggatccgaaagacgccggttatgcgctggtgacggtggccgatcagctgctgcagggcaaggacgtgaacaaagacctgtcgatcgaggggttgggtaaggccgacgtcgatatggagcacaaagtgattcggtttaataagattctggaagtcaccaaagacaacgccaaatcgcttggattctgatttttcgcgtaatttcgctacaccgggaaagtagttaaaccctcgtaggggcgcagcctgctgcgcccagggcttcggccgctacgcaagcacaggttaacgttatgacagcctcccccgcatttatcaccctggagaatatcagcaagcgattcccaggcgtgctggcattagaccagatcaacctgacgctgaataaaggcgaagtgcactgcctggccgggcaaaacggctgcggcaaaagcaccattattaaaatcatctccggcgtctatcagccggaaaaaggcgccaatatttcgctggaaggcaaactcttccacgccctgacgccgcagctgtccggttattacggcatacaggtgatctaccaggacctgtcgctgttccctaacctgacggtggcggaaaacatcgccatccaccgttacctgcccggcggccacttctgggtgcgcaagcgggtgatgcgccagacggcgctggacgccatggcgcgggtcggcgtacacatcgatcccgataaaaaagtagaaaaactgtcgatcgccgatcggcagctggtggcgatttgccgcgccatcgccgccgaagcgcggttggttatcatggacgaaccgaccgcctcgctgacccgccaggaggtcgacggcctgctgcgggtggtcaacgaattgaaagcagccggcatctgcgtggtgttcgtcagccaccgattggatgaagtgatggaagtcgccgatcgcatcagcgtgatgcgcgacggcaagctggtgggcacctggccggccagcgaactggacagccatgaactggccttcctgatgaccggccaacgcttccactacagcccgctgccgccgctgccgccggccgaacaggcgccgctgctcgaggtgcgcaacctcagccgcggcgaaaaataccgcaacgtcaatctggcgctgcgcggcggcgagatcgtctcgatcgtcggcctgctcggcgccggccgcaccgaactgtgcctcagcctgttcggcatgacgcggccggacagcggcgagatccgcatcgagggccaagcggtgcagctgcacaacaaccgcgaagcggtgcgccacggcatcggttatgtgtcggaggatcgtctgacgcagggattgatcatggagcaatcgatctacgacaacaccatcgtcaccgtcttcgatcggctgcatacctcgcttggattgctggatcacgccaaggcgaccgagctggtcaaccggctgatccgcgatctgaacatcaaggtgtccgacagcgcattgccggtgaagaccctgtccggcggcaacgcccagcgcatcgccatcgccaaatgggtcgcaacccagccgaagatcctgatcctcgactcacccaccgtcggcgtcgacatcgccaacaaagaggggatctatcagatcgcccgcgatctggcgcagctgggcatggcggtgctgatgatctgcgacgagatcccggaagcctattacaacagccatcgggtgatggtgatgcgcaagggcgagctgatcgccgaattcgcgccgcaccagagtaccgaacaacagatcgccgaggtggtgaatggataagtcattattggcccgcctggccgggcggcacgagttttatctcggcctgctggtgctgctgctggcgatcggcctgagcgccggcaccgatgagtttctgacgctcggcaacctgaccgacgtcgccaccagctacgccattctcggcatcctggcctgcgggctgttcgtggtgctgatcgccggcggcatcgacatttcgttcccggcggtcaccgccatcgcgcagtatgtgatggccagctgggtgatccagcacggcggcagcttcccgctggcgttcgccctggcgattggcgtcggcctgctgctcgggttggtgaacggtttcctggtgtattggctcaaggtgccggcgatcatcatcaccatcgctaccctaaacctgttctacggcctgctggtgtacgccaccaacggtacctggctgtacggcttcccggactggttcatgaacggcatcaactggttctcgttccagggcgccgacggctacgactacggtctgacgctgccgctgctgtgcctgctggcgaccatcgtcgtcaccggcgtgctgatgaaccgcacccggctggggcgccagatctacgccatgggcggcaaccgcgacgcggcgtcgcgcctggggttgaacctgctgcggctgcacttctgcgtctacggctatatgggcattctggccggcgtcgcggcggtggtgcaggcgcagatcacccagtcggtggcgcccaactcgctgctcggcttcgagctgacggtattggcggcggtggtgctgggcggcaccagcatgagcggcggccgcggatcgttgaccggcaccctgctcggcgtggtgctgctggccttcctgcaaaacgggctgacgctgctcagcgtctcggcctattggcaccaggtattcagcggcgcgatcattttgatcagcatcagcaccaccgcctggaacgaaaaacgcaagctgctcaaggagatctgacatgacgcagttaactcggttgatcccaaacgatcggatcattcgcctgcagggcgcgatcatcatcgcggtggcgctgctgttcgccgggctgctcggatcgcgcttcttcagcctcggcaacttccagtcgatcgcctcgcagctgccgatcctcggcctgctggcgctcggcatgggcataaccatgctgaccggcggcatcaacctgtcgatcatcgccggcgccaacgcctgttcgctggtgatggcggcgatcatcgtcagccatcccgaccagcctctgttcctggcgctggcgctgttggccggcctgttggtggcggtggcgatcggcgcgctcaacggcgtgctggtagcctggatcggcgtttcgccgatcctcgcctcgctcggcaccatgacgctgatcaccggcctgaatattctgctgtccaacggcgcggtgatctccggcttcccggcggcgattcaatttctcggcaacggcgccgtgctcggcgtaccggtggcgctgatcctgttcctgctggtggcggtcggtctgtggctgctgctggagcacaccacgctggggcgcagcctgtacctgatcggctccaacgagcaggccacccgctttagcggcgtgaacaccgcgcgggtgcagatcgcggtgtacatcctgtcggcgctgctcggctggggcgccgcgctgctgatgatggccaagttcaactcggccaaggccggctacggcgaatcttatctgctggtgaccattctggcctcggtgctgggcggcatcaacccggacggcggtttcggccgcattctggggctggtgctggcgctgatcgtgctgcaaatgttggaaagcggcctcaatttgctgggggtcagcagctacctgaccatggccctgtggggcggcgtgctgatcctgtttatcgcgttacagaatcgaaaagcttaggagaaaacagataatggcgagctattttattggcgtagatgtgggcaccggaagcgcgcgcgcaggcgtattcgatctcaatgggcgcatggtcggccaggccagccgggccatcgatctgtaccggccaaaggcggatttcgtcgagcagtcgtcggataacatctggcaggcggtgtgcaatgcggtgcgcgacgcggtcaaccaggccgacatcaacccgatccaggtcaaggggttgggcttcgacgccacctgttcgctggtggtgctggataaagagggcaaaccgctgaccgtcagcccctccggccgtaccgagcagaacatcatcgtgtggatggatcaccgggcgatcgcccaggccgagcgcatcaacgccaccaaacaccgggtgctggacttcgtcggcggcatcatttcgccggagatgcagacgccgaaactgctgtggttgaaacagcacatgcccaccacctgggccaacgccggctacctgttcgatctgccggacttcctcacctggcgcgccacccaggatgccacccgctcgctgtgctcgacggtgtgcaagtggacctatctcggccacgagcagcgttgggacaagagctacttccagcagatcgggctggaagacgtgctggaacatgacgcggccaagatcggcagcgacgttaaaatgatgggtgagccgctgggtcacggtctgacccagcgtgccgccagcgagatggggctgatcgccggcacggcggtgagcgtatcgatcatcgacgcgcacgccggcaccctcggcacgctgggcgccaccggcgtctccggcgaggtggccgacttcaatcgccgcgtcgcgctgatcggcggcacctccaccggccatatggcgatgtcgcgcaccgcgcgctttatcggcggcgtctgggggccgtattactcggcgatcctgccggaatactggctgaacgagggcggccagtccgctaccggcgcgctgatcgaccacgtcatccagtcgcatccgtgctatcaggagctgctggcgcaggcgaaagcccaggggcagaccatctatgaggtgctgaacgccattctgcgccgcattgccggcgagccggagaacatcgccttcctgacgcaggatattcatatgctgccgtacttccacggcaaccgctcgccgcgcgccaacccgacgctgaccggcatcctgaccgggctgaagctgtcgcgcacgccggaagacatggcgctgcactacctggccaccattcaggccatcgcgctcggcactcgccacatcatcgaaaccatgaaccacagcggctacagcatcgataccatcatggccagcggcggcggcaccaagaacccgatcttcgtgcaggagcacgccaacgccaccggctgcgccatgctgctgccggaggagagcgaggcgatgctgctgggcggcgcgatgatgggcaccgtggcggccggcgtgttcgacaccttgccggaggcgatgagcgccatgagccgcatcggcaagacggtcacgccgcagaccaaccagataaaaagctattacgaccgtaaataccgggtgttccacgagctgtacaacgaccacatgaaataccgccggttgatgcaggaggaggcgtgatgcagcaggagtggcggcaggccgtacagggctggcaaacctacagccaggagctggcgcagctgggcgaacgcctcgacgcgcacacctggcagcggctgctggcgctgctggccgactgccgcggtaaaatcgccgtcaccggcgtcggcacctcggggattgcggcgcgcaagatagcccatatgctggcctgcgtggagcggccggcggtctatctcgacgccaccggcgcggcgcacggcgatctgggcttcctgcgcgccgacgatctgctgatcctgatctcgcgcggcggcaattccgacgagctgacccgcctgctgccgacgctgcaggccaagggggtgacgctgatcgcggtgacggaaaacccgcattccgccatcgcgcaggcggcgcagctgacgatcgctaccggggtgcagaaggagatagatccgctgaacatgctggccaccacctcaattgtgttggtgttggcgatcttcgacgccgcctgcgcctgcctgatggcgcgcagcggttacgacaagagcgccttgctggcggtgcatccgggcggcggcgtggggaaaagtttgcgagaggaaaactgagggcccgacacagcgggcccggcagacattacagcggcatgtagatatcgaagcggtggcttttggtcagcgtggcggcgtgcgccggcacgtcggccagcggcggcgcgtagtccgggcgtttcaccaccacgcgcttggtggccaaacggcgcgccggttccagcaggccgtcggcgtcatcgtcgctgcccaccagcgattgaaacacccgcatctctttcttcaccagcgcgcttttctgcttgtgcgggaacatcggatcgagatacaccacctcggggcgcgggctgagatccgccagcgccgtcaggctggaggcgtgcagcagcgtcaggcgctcgcgcagccacgggccgatttccgcatcctgatagccgcgctgcaggccatcatccagcaatgccgccaccaccggattgcgttccagcatccgcacccggcagcccaacgccgccagcacgaaggcgtcgcgccccagcccggcggtggcgtccaccacgtccggcaggtagctgcccttgatgccgaccgccttggccaccgcctcgccgcggccgccgccgaagcggcgccggtgcgccatggcgccggagacgaaatcgacgtagatcccgccgagcttcggctcgtcgcgcttgcgcagctccagccgttctggggtcagtaccagcgccatcggcgcgtcatcgtcggacgtcagccgccagcgctgcgccaaaacagacaaggcgccgggatcggcgcctgcttcacacaataaacacacgctcacgtgtcgggttatcctttaatgccgtaatggcgcagcatagcatccagctgcggctcgcggccacggaagcgtttgaacagcgccatcggctcttccgaaccgccgcgcgacaggatgttgtcgaggaaggatttgccggtctcggcgttgaatatcccctcttcttcgaagcgcgagtaggcgtcggccgacagcacttccgcccacaggtagctgtagtaacccgccgcgtagccgccggcaaagatgtggctgaaggcgtgcgggaagcggccccagctcggtgaaggcaccaccgccaccattttcttcacttccgccagcgtcggcaggatctgcgcccctttttccgggctgtattcgaagtgcatgcggaaatcgaacaggccgaactccagctggcgcaggataaacagcgccgcctggtaattcttggccgccagcagcttgtcgagcatttccttcggcagcggctcgccgctctggtagtggccggagataaacgccagcgcttccggctcccagcaccagttttccataaactggctcggcagctcgaccgcatcccacggcaccccgttgatgccggagacgccggcggtatcgatctgcgtcagcatgtgatgcagaccgtggccgaattcgtggaacagcgtggtcacttcgttatgggtgaacagcgccggctggtcgcccaacgggcggttgaagttgcaggtcaggtaagcgaccggtttttgcaacgtgccgtcggccttgcgcaggctgccgacacagtcgtccatccaggcgccgccgcgtttgttttcgcgggcgtacagatcgaggtagaaactgccgcgcagctcgccgtcggcggcgaacagatcgaagaagcgcacgtccggatgccaggtttccacgtctttacgttctttggcggtgatgccgtagatgcgtttcaccacttcgaacagcccttccaccacccgctgctccgggaagtacgggcgcagctgctcgtcgctgatggagaacaggtgctgtttctgtttttcgccgtaataggtgatgtcccaggcttcgagctcgtccacgccatagtgctgtttggcgaaggcgcgcagctgcgccagctcttgctcggcctgcgggcgggcgcgcttggccagatcgctcaggaagccgatcacctgctccgggctctccgccattttggtcgccagcgacttgtcggcgtaggtatcgaagcccagcagctgagccagctcgtggcgcagcgccagcgtttccgccatcacttcgctgttgtcccatttgccggcgttcggcccctgatcggaggcgcgagtggcgaaggcgcggtacatctcttcgcgcagcgcgcggttgtcggcgtaggtcagcaccggcaggtagctcggcatgtccagcgtcagcaaccagccgtcttgctctttggcctgcgccatcgcctgcgcctgcgccagagcgctttccggcaggccgctcagctcggcttcgtcggtaatcagtttgctccagcccatggtggcgtcgagcacgttattgctgtaggtggaacccagttcggacaggcgcgcgacgatctcgccgtagcgctgctgtttgtccgccgacaggccgatgcccgacagttcgaaatcgcgcagcgcgttatccaccgccttgcgctgcggcacgctcaacgcctcgaacgccgcgccctctttcaggctgcggtaggcctggtacagcccttcgtgctgtccgacccaggtgccgtactcggacagcagcggcagcgcctgctcataggcggcgcgcagctccgggctgtttttcaccgagttcaggtgcccgatcggcgaccagatgcgcgacaggcgatcgtccgactccgccaacggctgacacagattgtcccaggtgaacgggcccggctgcgcgaccacgcgctctaccgcagcgcggcagtccgccagcgcggattgcaccgctggcacgatatcttcagggcggatcgccgagaaaggcggcagggaaaacggggtcagcaacggatttgtcatagggcagtcctgattagcgttgggcccgccgcacgggcgagccttaaaatgcgtatgaatctctaacatggagccagacaacaggaaaatcaatgcccggcgttgatcgttcgtgccttaaacggcgctttggcggatgcgggcggccagcgccgccagctgttcgtcgtcggcgcgcgcggcgtcgtgggaggagatatagccctcataacgttcgaaaaacttcggcgaggtcgattcgatcggccgccactgttccagcgatgcggtgccgtgcagcgggatcagtttggcgtgcacgtggtcgacgccgtagccctcgaacaccatgccgcagcggccgacgtcgtcgaacgcgcgatccagctgcttcgccacccgcttggtcgccagcatcaacgcgctcagcacctcgtccggcagatcaaacgcgtagctcgggtggtgcgccttggggatcaccacgctgaaaccgtcggtattgggaaagatggacaggaacgccagatggtcgtcgtcttcccagattttatggcacggcgccttgcccgccacgatgtcgcaaaaaatgcagctcatcctttctccttgtgattcacagcgtttcaacccattcgaactcttcgaacaccagccacatgtccggcgcaaaagtgccctcgcgggtaaagaactcttgatgcccctggcgccaaaacgccaggcttttgtcgccttcaccctctttggccgccatctcggcggtcacccgatcgtagcgcaccaggcgcagcgccagggttctgatcacgcaggccggttcgccgcggccatcgagaacgatgctgtaatcgccgatccgcggggtttgttcccgacgatagctcgcataggaactgcaggtggcggttttatccccgctcagcaccaatcccagcagttcgtcggctaacgcggggccgtcgccgaatgcccagcgcgccgcgtcggggtaattcgccaaaatcgcctgtttgctcatcgtcctgtccctttctgttaacgtctgcggcaacggagtccggtttttcccggccagacagtttatactgtgcagattataagccttattgcattgaatgctccgcctgcggagcacaaggaaccgccacccgtcatgttaagttatcgccacagtttccacgccggcaaccacgccgacgtgctcaagcacaccgttcagagcctgatcatcgagtcgctgaaggaaaaagagaagccgttcctgtatctggatacccactcgggcgcgggccgttatcagctcagcggcgaacacgccgagcgcaccggcgaatacctggaaggcatcggtttgctgtggcaacgcgacgatctgccggaagagctggcggcctacatgagcgtagtgcacaacttcaaccgttccggcacgctgcgctattatcccggctcgccgctgatcgcccgccagctgctgcgcccgcaggacaaaatccacctgaccgagctgcacccgagcgactacccgctgctgcgcagcgaattccagaaagacgagcgcgccaaagtgcagcgcgccgacggctatcagcagctgaaatcccagctgccgcccctgtcgcgccgcggcctgatcctgatggatccgccgtatgaaatgaagaccgattaccaggacgtggtcaaaggcattcaggaaggctacaagcgtttcgccaccggcacctacgcgctgtggtacccggtggtcatgcgccagcagatcaaacgcatgctgcgcgatctggaagccaccggcattcgccgcatcctgcagatcgagctggcggtgaaacccgacagcgatcagcgcggcatgaccgcctccggcatgatcgtcatcaacccgccgtggaagctggaacagcagatgaagaacgtgctgccgtggctgcacaaggtgctggtgccgtcgggcatcggtcaccatctggtgaactgggtggtaccggaataaaccccatcagggcgcggtttgccgcgccctgcgtccacctatcgcagccatcgacgcaatctttgcgacaaaccccggtcaggcgttaaactcttaccctcttcaaattcacaactcatggaaatcccagatgacgaaacattacgattatctagcaattggcggcggcagcggcggtatcgcatcgatcaaccgggcagccatgtacggccaaaagtgtgcgctgattgaagccaaagagctgggcggcacctgtgtaaacgtgggttgtgtaccgaaaaaagtcatgtggcacgcggcgcagatcgccgaggccatccatcagtacggcccggactacggcttcgacactaccgtcaacgccttcgactggaaaaagctggtcgccaaccgcaccgcctatatcgaccgcatccacaattcctacgataacgtgctgggcaagaacaaggtcgacgtgattaaagggttcgcgcgcttcgtggatgcgcacaccgtggaagtgaacggcgaaaccatcaccgccgatcacatcctgatcgccaccggcggccgcccgagccatccggctattccgggtgcggaatacggtatcgactccgacggcttctttgagctggacgccatgccgaaacgcgtcgccgtggtgggcgccggctatatcgccgtggagatcgccggcgtgctgaacgcgctgggcgcggaaacgcacctgttcgtgcgcaagcacgcgccgctgcgcaccttcgatccgatgatcgtcgaaaccctggtggaagtgatgaacaccgaagggccgagcctgcacaccgaatcggtgccgaaagcgatcgtcaagaacgccgacggcagcctgacgctgcagctggaaaacggcaaagcattcaccgtcgactgcctgatctgggccatcggccgcgaaccggcgaccgacaacctgaacctcggcgtgaccggggtgaaaaccaatgagaaaggctacatcgacgtcgataagttccagaacaccaacgtcaaaggcatctacgcggtgggcgacaacaccggcgcggtagaattgaccccggtcgccgtggccgccggccgtcgcctgtccgagcgcctgttcaacaacaagccggacgagcatctggactacagcaacatcgccaccgtggtgttcagccacccgccgatcggcaccgtcggcctgaccgagccggaagccatcgagaagttcggtgcggacaacgtgaaggtgtacaaatcctccttcaccgccatgtacagcgccgtgacgcagcaccgccagccgtgccgcatgaagctggtgtgcgcgggtaaagaagagaaaatcgtcggcctgcacggcatcggcttcggcatggatgaaatcctgcagggcttcgcggtggcggtgaagatgggcgccaccaagaaggacttcgacaacaccgtggctatccacccgaccgcggcggaagagttcgtcaccatgcgctgaggcgcaacttcgccgggttccggcgcgtaacaggccaggcgcgaaagcgtctggcttttttatttatcccgctcgcctcacggcgcccggcggtaatgatcgcgaagaaacaccggcaaatcgttcgccggtgcagcaaagggcacctgatagagcatatcgccgacaaaaccacgatgataggtcgcgtggttgacgacatgcagcacgatttcctgccgtgtcatgcggccttcccccccgccgacgaactcgaaatgcaccacctgcgccagcgcctcgggcgaccagttgtccacctgttcgatataccagcggtccatttcctccaccgcacaccgcagagagtcaagcgcaggcgtttgctcggtgttgcgcgcgaggtagccatgcttgcggccttgcagatggtgcctgaagatatcgtccaccacgtacacgtgattcaaggtatgcaccatattgccgaaacgggtcgggcgcggccgcagcgcttcgtcctccggcaaggccgccacacagtcaaaggtcaaggcgttcgcccacgctttgtaacgcaccagcattttcaaggtatcgatggccgttgcagacatactgttcactccttatcggatgaaaatcgatattccgttcagccgcacgcgggtgcggcggcgcgttctacgccgtgccaatcccatgcagccgaccttcgacctgagtgcgcgtattgccacccacccaaatccggccgctctcgtcgcgggtgacatgcacgcgcccgttgcgcccacggcagcggccctgagcggcgatatagccgccgctgaccacgccgcttgcaaacagccactgagccagcgaggcattgaggctgccggtgaccggatcttcgacgatagcgccaaggtgatcgctcaaaaaagcgcgcacctcgaaggctgcgtcaccatcggcatgtgggccgacgacgccaatgtccactctgcgcggccagcttctcgccggcgtcagggaaagcacccgctcggcgctggccagccggatccccagccaccccggaccgttatcgatccaggcggcatcgagcgcctcctcaggcgcgatccccaaaaaccgcagcgcgtcggccaacgccgcttctgacggcgccccggagcgaatcaacggcggcgcggcaaaacacagccgtccgccctcgcggcgaatgctcaccaagcccgccccgcactcctggatgatctccgcgtcattacgcggcgtaccgcccgcagtgagccaggcatgacaactgccgagcgtcgggtgcccggcaaacggcatttcacgatccagcgtgaatattcgcacccggtaatccgcctgtgagtgcataggcggcagtaaaaaggccgtttccgacaggttgaaccaacgcgtcaagcgctgcatgtcctccgtagacaacgctccggcgcccgtaatcaccgccaacggattgccggcgagtggcccggcgccaaagatatccaccatctgcatgccaaaaaccatcgcttctctcctcaggttaacgccgggcgttcattacccccgcgatatcaacagctccaggcccgccaaagcgaacagcagcgcaagcgttccttcaatccagcgcctcacccgggtgtaaaacgcgatcatcggcgacgttgagaacagcagggcataccccccgaaaatcgtcacgccgagcaacgcacacccgccgataatcgccggtaaaacaccttcaggcgccccttgtcgcaaacccagcgacatgatcgccatccaggacatgatggccttgggattaccgagatgcatcagcaccccctgccgatacaacctctgataagatcgcgcactatcccctgccgctatgcctgtcgagacgggagacgcccgtaatgcggatcggccggcgcgcagcgccagatacagcatatacacgccgccaacgatcttgatggtccacagcgcctgcgcatacgtggccaacacggcggaaaggccggtcgcggccaacatcgcccagcacagcgatccggtcaccaccccggcggccaacaccaatgcgggcctgcggccgtcacgcatcgccacgcccatgatcgccatgttgctggggccggggctggcagttgcgaggagataggcgccgtaaaccaacgcaagctgactgaccatcatggaaaaactccgctgacccgccttacggccgagccgtagttgaaaatgccgggactcctcaccaacatagtatgtgttacacttttcgcctatttaaatagtgtcacgtgacactatattctttctccggagagcgaatatgcggcttcaatccccctggcagccccgcctggccaatgtggaagccactaccgtcgaacggctggtgttggcgttggctgacgacattatcgagggcaagctgcaagggggcgatcgtttgccggcccaccgtacgctcgcctggcaattggcgatcggtctgggcacggtgaccaaagcctatgccatcctggagcggcgtgggttggtgcgcagcgtgaaaggccgcgggatgttcgtggcgatccgccgcgcccgtgaaaaacgcgaaatcgatctttcatccaatgcgccgccggcgatgcttaccgatcgtttgctggcgcgcacgctggccagcattgcgcggaaaatggatgtggaccatctgaacttctattcccctccgaccgggcatctggagcaccggcgtttgttggcccgctggctggaaaacgccggcgtcacgatcgatccgtcgcacctggcgctgaccagcaatgcccgtcaggcgatttcgctggcgtttgacctggcctgcgggccacgcggcacgatactgaccgagagactcacctaccccggcgcgatcgcgctggcccgacgtaaaggccatcgcctgatcggcgtggagatcgatgcgcaaggcatagtgccgcaggcgctggcgagcgcgctcgagcgagtctcctccggccataccgcggtctatctgacgccgacactgcataatccgacaacagccaccatgagcgccgagcgcaggcaggctatcgtcgagatatgccggcgggcgaatgtctggatcatcgaggatggcgtgtatgcgctggggcattcagcggcgcctgcgctcgcggctctggcgcccgagcgggtgttccatgtcaatggcctgtcgaaaacgctcggcccgggattgcggatcggcatgctgactctgccgcccggcatgcaagctgcggcggaagaagccttgcaagatcttcctttcgcaccttcgccactgtcttgcgctgtggtggaggagtggctggccagcagcgcgatcgagacgataccgcaagcgttgcgccatgaggctcagcgaagagtacatctggccacctcgatattcgatgccgacgaatgcgtatcgcatcccgacgcttatcatgtctggctgccgatgccgcgcgaaaccgccgagtctgtggccgccgccgccgcattggccaacgtaaaggtgacgccgccggacaccgtgatggtagaccgcgacgaacgtgcgacgggcattcgcctgtgcctgggttccccctcgccggacgagctaacggcaggcctgacgcagctggcgcagctgttgaaagcgcatcgaaacggctgacaaacggaagagaaaggttacgcgtacaggccgaccggcccaggactgttctttttgtgcggtttactattcccttcgcacccgcctgctttttctgccattattctgcctgataaattagcgggactgatacaaacctccccgcgcctctggagaacgccgatgctgttcaaactatgcaaaacccttgcgatggcctgcgtggccctgattatcgcccagagcagcgcgctcagctttaccctggaagtggcgggcaagatcgacaacgtgaccgacccggtcaaaaaaagctatctgttcaccgataagcagctgttggcgatgccggtgcgcagcatcaccacctccacctcctggacgccgcagagaaaatttgaagggatttcggtggccgatatcctggagcgcgtcggcgccaagggcgagacgctgactttctacgcgctgaacgattattacatcgacgtgccgctgtccgacgtcaagaagtacaacatgatcctggcctacaggatggacggggaaatgctgaagctcagaaacttcggcccgctgttcctggtttacccgcgcgacgccgccgggcctgaactgaactcgccgttgtacaattcacgctttatctggcaagtcgacaggatcgtgatcaaatgaagctgacgacctttaagaacggcagcaggctggcgatcccggccatctttgccgcgctgtttttagtggcttcgaccgtcacgctctattactacagcgccaccctgtcgaagaaagggctgtatgccatcgccggcacgcaggagaactactcctggtctatcgccaagttctccatcaagctggcggagttcgacacgttcgtcgagcagcaaagccatgccgcgcaggtggacagcgacaacctgcggctgcggttcgaaattctctattcgcgcttttacgtgctggaaaccgtctccgaatccacgcaaccgctgtacgccgagccgggctacccggaagtggtcaagcagatgcgcctgcagatggatcgcatcgataaactgctggataacccgaaaatcgacttcagccaggttttcgcggccatgaaggccatcaagccttacgccatcgaaatggccaacctgaccgaccacgccgaggtgaagcagcgcaccgccgcctatgaggactacatcgagaaacggcacatcattttctatgggctggtgatcgtcatgttctcggtgatcgcgctgatcgccatcaccctgatcgtgttccgccagcagcggctgaccattcgccagcaggccaaggccattgaggcggagaaagcgacacgcaccaaaaacgccttcctcggcgccatcggccacgagctgcgcacctcattgcagagcgtgatgtcggccatcgacgtgctggtgaacacccgggtgtcggcggagcatgcggacactttccagcggctggagaccgccgcgcagcaaatcgaaagccagatgaaggatctgaccgactacgcgcacctcgacagcggcatgatggaattgcgcatcgtgccgttcgacgcgcagaagctgatcgcggaaaccgccaatgaaatcgccaccctgacccgcaaagagcaggtcaaactgagctgcgaagtggagtgcagccacctgttggtgcactccgatccgctgcgcatccggcagattatcgttaacctgctgaccaacgcctacaaatacaccgaaagcggcagcattacgctgcacagctgcctgcgccgtcaacccggcggcagttcgctgattatcgaagtgaccgacaccggcatcggtatcgaaaaagaccagctcgatcagatcttcaaaccctttacccagttggatcagtcgcataccaagcaatatgccggcgtggggatggggttggcgatcgtacacggcctggtgacgctgctcaacggcaccatcacggtgtacagcgaaatcaagaaaggcagcacctttatcgtcagcattccggtgcagatcagtgaagaagagcgcgccgacgagcccgccgccgccaatgcccccctgcagcaaaagccgcagcaggtgctggtggtggatgacaacaagtcggtgggtgacgcctttgcggcgttgctggataagctgggttaccagcacgaactgtgcgactcgccggagcgcgcgttgcagaagctgctcagacgcccttacgacgcgctgttgctggatctgcagatgccgggcatcgacggcgccgccctggccaggcagctgcgcaatcgtcgcggccccaaccgccatgtgccaatcatcggcatcagcgcctatacgccggagcagctgacggcggatcagcgcgccctgttcgataactacctgatgaaaccggttcggctggatgcgctgtcgagcgcactggccgaggtgttccccgctaaagattaaaacagcgttgcagtgcggcttcgatcacatggagccgcaccggtttttcataaggaccgagcacatcgtactcgcgcatcgcctgagcgatctccgactcgcgtcggtcggtgcccagttcgccggtcagcaccagtaccggcgcgtccgggttgtcggaggcgcggatggtggcgatacagcgatccgccgtttcctcaccgatcagccagtccaccacgtaaccgtcgaacaggctttgctgcaacgcttggcagaagctgtcgacatcgtaaaacgccactgcgttgaaaccgcagccgccgaggtacttggccagctcatcggccgcctgatgcgaatcgtccaataccgcgatgctcaaccgctcgtcatcgccgtagccgggccggatttctatcagttcgacgccgtaacgcagacctgccggcgcctcttcggcgcgatagatatgccattgcccctccacacgcagcgccacaaactccgccggccgcccggcagaaagttcgtcgccaatgtgcccgacgcaagggatcgccacccccgccacgaaaaagatggcatcacgcgccatgtttggctcggtcgtctcgtgttcggcgctcaaatcggcgatcgccgccggcgtttctcccaacgcggccgcgacgctgttgatctgttccagcgtccaggggctttgccctttcaatttgcggtgcgcatgtgaaaaactcagatccaagatgcggctgagttcgcgggcatgctgacgttttccaatcccgtaatgtaaaaacagctccctgacccgattggcaatcgactgtgaatcgaatttttgatgattgttatccatttgttccttcgattttttttactgatttatcagtcgttttgattatttctgctgaaaaagccacacctaaaactagcatcccatgcaattatgcgttaaaaacgttgcttgacataccatgttgtatcgtcaaacatggtatcaaaagagacatacagcaatacactataaaaaataacaccagcacgatttttaataataaccatagtaacaccagggaaaatttgttccgttgccgctactgagacgatgctcacatcgcttggactgcataagcaaaacggggcttgagcctttagcgctaatctgttttacccacttttaagccgggatccgtcagggtcccggttttttattgccctggcgccgcgccatcatacggactcaccccgcagccgcaaataaaaacggagccggcatgccggctccgttgaccctgtaatgaccgcttggcttagaagcgccaggtgaaaccggcgttgacgctgttgtcttggtggttctgcgacagcagcccgccgtagcccagcgacagcgaggcgttctcgttcaccgccacttccgcccccgccttcagcaccatgccgtcgcgcgacaccggcacgctgtccaccacgaacggcgcgttgccgccgttgaaccgcagcccggtgccacgctccagcccgccgtactggtgttgccaccccagctcgctgcgcagcgccaccgtcgtgcccgggctcacctgccacgcagtgtccgcacgcagccccagcgtcgacaccgtcgcgtcggtgtgctgcttgtcgccgcgcagcgccgctgcgccgccgctttccgcgatgccgttgttttcaaagttcacgtacgccaggttgacgaacggctccaggttcagccactcacccttcacgctgtaacccgcttccgcgaacagctgctcggtgcgcgcgctgtacttcgccgtgtcgcggtccgactgcatcccgtagttcaccgaccgtttggtgtcgatgcggtgccaggtatagcccgccccgccgcgcagcgccagcgccccgaactgcttgtcgccgtacgccgccaggtggtagttgtcgctgtccgccttcgacccgtacccgccgtgcagcgaggtgcgggtgtagccggtcgccacccccagccgccagtcggccgccgccgccgagtccagccccaccagcaccccgtaggtcgaggcctgatagcccgtggcgttggcgtcgcccgacgcatggtcccacgcccccagcagctgcgcccaggcgccgtcctcgtccgccttgatggccgacgagctcgccagcccttccgcctgacgcagacgcccgttcagcgcctcacgcaggtagcggctgtcgttcaccagcgccgacgcgatgtccgcatggatttgccccgacagctggcggaacgcctgccgcgcctcgcccgccgtgccgctgttgagaatgctctcgtacaccgggttgcccgccgccagcgcatccgccgccgccgccaccgcccgctcgttcgccgtctgcgccacgctggcgaagcttgtgccgttgcgcccgacgctcagcgtcaccccggtcggctggtagctcagcccggtgccgaggaacaggtagttcggcgccaccgcgtcaaactgcccgctcaccccctgctgcgcactcaggatggtgtactgctggcccagcaggctgcgcacctcgctttgcgtcagcaggttgctgctgttctccagcgtcaccgccacctcgccgccgccgatcgtcgccgctccgctgctctggatccgatcgctctggccgttcggccccacttccaccgcgtagcgcgaacccggctcgaagctgacgttgccggccacgttcagggtgccgatcgagttgcccggtgccacggtgccgccacggcgggcggtcagcgaaccgaccgtgccgctgccgccgacgatgccgccgttctgcacgctgacggccgaggtgaccgagccgttgatcgccagccgcccctgattgaccagcgtcgggccggcataggtgttggcgccggtcatgaccagcgtgcccatcccttctttggtcaggccgccatggccggagatgttgttggagtagacttccagctcgcaactgatgtcgtcacactttctggcgtgcagcgtgccggcatccacctcggcgcccagacccggaatattggcgacaaactgggtcgggccgtaggccacgcccgtcggatccggaatgcggaactccgcaggaatatcttcaacggtatagaacatgcccgggccgttgatggccttgcccaggttgatcatcccccagccgtagagcgcgtcgatgcccggcgcgcccatgtcggtggcggtggttttcagcacgtcggcaatctgcgccgagctcatgtacgggaagcgctgcagcaacaccgccaccgcgccggtgacgtgcggcgtcgccatcgaggtgccatttttattgccgtagtccgacaccaggttggccggatcggaaccgttggccacggtgctgtagattttgctgcccggcgacgagacgcagaagctggcggtatagccgcaacgggaagagaagctgctgatggtgtaaggcacgctgttggtcgatgccgcatcctgcgccacgctggcgaccgacagccagttcggcgcgatgtccggcacgaaataggccagcccgctgatcacatccggctggttgtagttgccgtcgttgccggcggcgaacagcaccagaatattcttgcgcgcggcgtcgatagcgccctgataacctgcgccagccaggctgccgagcagcggtttgacctgatcgaactgttcctgcgcatccttcagctcaaagtgcaacgcattaggatcgcggccgccatcggacagaaagtcgggaatgctgacgccccagctgttgttgatcacccgcgcgccgctcttgatcatcgcctgccagccggcattagtgacggcgccgtccaggccgaggaattcgccgtaagccgggccgtcgttgtcgttatcgacgctgatcacctgcgaatcgaaggccacgccgtgcatgccggtgccatcgcggttggccgcgctgatccccgcgacgtgcaccccgtggttgctcaatgtcgccccgctatagaaatggaaggtgccgtcgaagtaaaagcgatcgccggcgttgatccccggccggtgcgggtcggtataggcgcggtagccttcggtgacgacgttgatcagtttgccgtcgccagcaaactcgggatggtggttaaccggggtgtcgaaaatgcccaccttctgccctttgccggtatagccggcggcgtaggcctcatcggcgtggatcgcccccagcccccagttggcgttgaattcggcgctgcgccagctggccggatcgccggcttggccgttcacctcgtgcggcgccgcctgcgcataccccgccagcgccatgcagcagaccagcgcgttcagccgccacggcgagcgacgagcgtttcctttgctatcaaaacccattgttgttgtcatttccttaccttttgcttgttattggccgacgccccaggtgcgccgggttctcattagcaggatgtgaaaaaggaaccgcccgcagacggttcccgtacaaggattgagtcgatgttgcttagaagcgccaggtgaaaccggcgttgacgctgttgtcttggtggttctgcgacagcagcccgccgtagcccagcgacagcgaggcgttctcgttcaccgccacttccgcccccgccttcagcaccatgccgtcgcgcgacaccggcacgctgtccaccacgaacggcgcgttgccgccgttgaaccgcagcccggtgccacgctccagcccgccgtactggtgttgccaccccagctcgctgcgcagcgccaccgtcgtgcccgggctcacctgccacgcggtgtccgcgcgcagccccagcgtcgacatcgtcgcgtcggtgtgctgcttgtcgccgcgcagcgccgctgcgccgccgctttccgcgatgccgttgttttcaaagttcacgtacgccaggttgacgaacggctccaggttcagccactcacccttcacgctgtaacccgcttccgcgaacagctgctcggtgcgcgcgctgtacttcgccgtgtcgcggtccgactgcatcccgtagttcaccgaccgtttggtgtcgatgcggtgccaggtatagcccgccccgccgcgcagcgccagcgccccgaactgcttgtcgccgtacgccgccaggtggtagttgtcgctgtccgccttcgacccgtacccgccgtgcagcgaggtgcgggtgtagccggtcgccacccccagccgccagtcggccgccgccgccgagtccagccccaccagcaccccgtaggtcgaggcctgatagcccgtggcgttggcgtcgcccgacgcatggtcccacgcccccagcagctgcgcccaggcgccgtcctcgtccgccttgatggccgacgagctcgccagcccttccgcctgacgcagacgcccgttcagcgcctcacgcaggtagcggctgtcgttcaccagcgccgacgcgatgtccgcatggatttgccccgacagctggcggaacgcctgccgcgcctcgcccgccgtgccgctgttgagaatgctctcgtacaccgggttgcccgccgccagcgcatccgccgccgccgccaccgcccgctcgttcgccgtctgcgccacgctggcgaagcttgtgccgttgcgcccgacgctcagcgtcaccccggtcggctggtagctcagcccggtgccgaggaacaggtagttcggcgccaccgcgtcaaactgcccgctcaccccctgctgcgccgtcaggatgttgtactgctggcccagcaggctgcgcacctcgctttgcgtcagcaggttgctgctgttttccagcgtgaccgccacctcgccgccgccgatcgtcgccgagccgctgctctggatccgatcgctctggccgttcggccccacttccaccgcatagcgcgaacccggctcgaagctgacgttgccggccacgttcagggtgccgatcgagttgcccggcgccacggtgccgccacggcgggcggtcagcgaaccgaccgtgccgctgccgccgacgatgccgccgttctgcacgctgacatccgaggtgaccgagccgttgatcgccagccgcccctgattaaccagcgtcgggccggcataggtgttgttaccggtcagtaccaacgtgccgataccctgtttggtcaggccgccatggccggagatgtcgttgctccagaaatccaggccgcacagcacatcgctgcagacgcgctcggtcggtttacccttgtccagcaccgcgccgacgcccggcagatccaccacaaactgggtcgggccgtaggccacgcccgtcggatccggaatacggaactccgcaggaatatcttcggcagtcaccaacatgcccgggccgttgatggctttgcccaggttgatcatcccccaaccgtagagcgcgtcgatgcccggcgcgcccatgtcggtggcagtggttttcagcacttccgccacctgcgcaccactcagatacgggaaacgctccatcagcaccgcgacgctgccggccacgtgcggcgccgccatcgaggtgccgctgtatttggcgtagccggttgtcagattctctaggctggtgccttcgattaccgagctgtatacccgggtgcccggcgccgagacgcagaagctggcggtataaccgcagcgagaggagaaggtgctgatgctgtaatcgccggtattggtcggatcctgcaagctggcgaccgacagccagttcggtgcaatctccggcacaaaataagccaggccggccatggcatcggggttattcagattgccgtcgttaccggcggcgaagatggtgaccacgccgctgcgggccgcgtcgatcgcgccctgataggcgccgccaggcttggtaccgaggatctgtttgatctgatcgaactgcttttgcgcatcgtttactgtgaaatgcggataagccgggtcataaccgccctcatcaaacttttcggtaataccgatgccccagctgttgttgatgatgcgcgcgccgctggccaccagcgcatcccaaccggccttatacaccgcgccgtcgttgccgaggatgatgccgtcctccgggccgggatcgccgttctccgcgctgatgatctgcgcgttgaacgccacgccgtgcatggcgccgccgtctcggctgccggcggcgatgccgcccacgtgggtgccgtgcgaaccgagcgtgccatcggaatccacgctcggcgtgccgtcatagcgaaaagcgtcgccttttttcaccggaatatagggatcggtgtattcgcggatgccttcggtaaccagattgatcaccttattctcaccggcgaattccgggtgcttggcgtaaaccggttgatcgaaaatgccaagtttgatgccttttccggtataaccggcggcgtaggcctggtcggcgtggatcgcccccagcccccattctgcattgaactcactgctgcgccagctggccggatcgcccgcctggccgttctctatatagctggaggcctgcgccccgccaatcgccgtcaggcagatcagcatcgcgctccattgtgcgcgatgaactccgatttcaggccagccgaaggccgcccgagcggatttgactcctctacgtttcttctccatcccagataccgtccgttgttgtttgcaaatgttttataagattttttgtgtaacagtttggtaacaccaaataaataaagcacaacaatctcaagtgcgcttaatgtgtcatccggcagttcgacgggaggagagaatgtttcaggggtgaatcaggccagtgccgataagaaatgacaatgacgtttaccggtatcgaaacggcgataataagtgaagggataaattataatttactgataaataaaaatataactcagggagacatgaagagtgcggccgcctgaaaagtgcttaacaggcgtcttttatcacttttaattataaattttgccaatattcactcagtgaattatgctggtttttcactcggccatcggcaaaaattggattatcctgctgatgtttttttgcagttcgtcgcgtcctcttccgcctgacgcagaatggctttggccatccattgcgtgacgtcctgaatgctctcaagctccagcccccagatatctttcagcaccagaaacacctccgagccgtaaatcagcgagaaagcatgaatcactctctgcagagagaccggcggcagtttgccctgcagtggttccaccgccagcgccaacagacgcttgcggttgccgcgcacaaacttttcgcccggcgtggcgtgtgcccactgctgcaaagagagctgcagcgccgcgcgcaatgctccctcgtgccgctccatctgaggataggcgaaagtcagcaactgctggatgcgtttcagggcgtcatcgtcttgcgggcgccattccagaataggccccaggctttccgccaccacggcgctaatcagcgcactctgggtcggaaaatagcggtaggccgtcgcacgcgatacctgcgcatgcgccgccagttcggtgatcgaaggaaacgccccttcgtcatacagcgtcatcgcgctggccagcaacaaacggtaggtttttgcccgggtggaagtcagtaaaggatcaaacggggtgggaaaggcatctatcggcacataaacctcatgcatctgcacacgcttgcgcaacagaggatgcccctctgtcgactggctgccggcaaagcgccggccacgttgaaaagctcaaaaatgagacaggagtcccattttgcactgagctgcccttgcaaaaatgatactgccgtctcattatataaatacattaatcattttaatttaaacgccaacaccagggcaccctaaaaaatataacaaaatgatttttaaataaaaattagaaacaccccaggaagatacatgaaagacacttcaaattttgtctatattgctaccacagcagatacgaaaggacaagagctggagtatgtacggcggctgatcgctgccctgaatttacccacgcgaaccgtcgatctttccactcgtcgcttgccgtttgactccccggccgatatcggtccagaggacatcgcacgccaccatccggcgggcgccggcgcggtcttctgcgccagtcgcggccaggcgatcgccgccatggcgaccgctttcgaacgttttatcctgacgcgccgcgatatcgccgccttgcttggcctgggcggctccggcggcaccgccatcatcacgccggccatgcagcagctgccgatcggcctgccgaaagtgatggtctcgagcatggcggcgggagacgtttccgcctatgtcggcgccagcgatatcaacatgctgtattcggtcaccgatctcgccggcctaaatcgcatctcgcgacgggtgctgagcaacgcagcgcgccagatagccggcgcagtgcacttcgccgccgtcgactatcacgataacaaacccgcgatcggcctgacgacgtttggcgtcaccacgccctgcgttcaggcgttggttgccgaactgggaacacaatgggattgtctgacgtttcatgcgaccggcagcggcggcagatcgttggaaaaactgatcgataaccgccaactgcacggcgccatcgatttaaccactaccgaagtggccgattacctgtttggcggtgtgctgccctgcaatacggatcgtttcggtgccattgcgcgtaccggcatcccgtgcgtgctctcctgcggcgcgatagacatgatcaacttcggcgcgccgaatacggtgccggctcgctatgccaaccgtctgcgtcaccatcacaacccgcaagtgacgctggtacgcaccaacgcgcgggagaatgcgttaatggggcgttggatgggcgaaaagatcaacgcctgcgcgggcgaagtgcgtttcgttatcccggcgggcggcgtatcggctttggatgcgcccggccaaccgttctgggatccggcggcgctggccgcctttacgcaagcgctggaggagacggtatacgccaccgacaaacgccggctgataaaaacgccttatcatattaacgacccgcgctttgcacaggccgttgccgaacagttccggcgcattgtcggcggggaatgattatcactcactgcagaacctgccggtgataacgccaaataaaaagggccagacaaatagtctggccctttattattcaccgcgagcggatattactgaccggagggcatctgctccttcattttattcatgtggtccatcatcttttgctcgcgtttctgataattctcattgtattgttttttctgctcaggcgtcagcaggttatacattttattttccgctttggcgcgtgccagcatgcgttcggattgcgctttgccgatcgcgtcaatttgcgccttcgccttcgcttcgtcaaagctgtcggaagcgaccagattgtgcaacgcctggcgctcctctttcatgcccggcccgcgcttctggtgcgactctttcatgatatcgcgcatctgctggcgctgctgctcggtcaggttcagcccggcgaacgggccgcctttgccttcacccttgtgatgcatcattttcatcggcgccgcatccgccgccggggccgtcgtcgtatcggcggcgaacgccgcggaagcagaacccagagccagcgtggaagcaataaataaagccgtcaatttacgcataatcatttccttaaaaattttcttcatcaggagcgctgtacgttaacaggctcattcgttgtcggagataataataggctgataaatttcaagtaatgcgagggtgtgtaaactttttaaaacccgtctcggatttattcaccaattatgagaaaactatgaagatggcgtttatttgatggaaattttaatttctcggcaaaaatccccccggtggagttatttttccgctttctcctcaccgctataatttactcacctgcacggcaaccttgtatcaaccgttttccgatagcaggggaaatcactaagcatcacacgatccgatgttctcctacactttaaggcaagcggccgccgggcgacgtttacaccgcaaaactaatcattgcttatataatagtttccatcacccgccccgcctgtgaaaacctgttatatgatgcacagatgcgtacggcgatcgctttcgggccaacaggctgcccggcgctgtgccggccgcccgcccgtgctcttttgaggaatcgtcatgcccgcagaccaaggccctgagcttcttagcgctcacttcggcacccaaagcccccactggcggctggcgtttgacagcaatgccctggagctgtccgctattaagggcaaagctcatgtcgcggtggcgctcagcgccatggaagcggcgaaaatccgccgtctgaccggcgtgaccgccagccttgagctgaccattacgctagccggtgaaccgctgcatctgcatctggtcgggcgccgcgtcaacaacctcgaatgggcgggcaccgcttccgccttcagcgacacccaatccgtggcgcgcgacctggtgcacggcctctccttcgccgagcaggtggtgtccgaagccaactcggtgatcgtgatcgtcgatcagcacggccgcatccagcgcttcaaccgactgagcgaggagtacaccgggctgcacgaacacgaggtgatcggcaaaaacgttttccaactgtttatgagcccggaagaagccgccgcttcgcggcgcaacatcgccggcttcttccgcaacggttcgtcctatgaggtggaacgctgggtaaagacagtcaagggtgaacggctgttcctgtttcgcaacaaattcgtgcacagcggcagcggaaaaaacgaagtctttctgatctgctccggtaccgacatcaccgaagaacgtcgcgcgcaagagcggctacgggtgctggccaacaccgatctcatcaccggcctgccgaaccgtaacgccatacaggacaagatcaatcacgccatcaccacgcgcggtgaagagagtttcggcctggtgtacctcgatctcgacaacttcaaaaaggtcaacgacgcctacggccatatgttcggcgatcggctgctggtcgaggtcgctctggcgatcctcggctgcctgagcccggatcaagtgctcgcccgcctcggcggcgacgaattcttggtgctggcgccacaaagcgatcgcgagcgcctgcaaacgctggcgcagcgcattatcgacaggctgaagaccccttttcgcatcggcctgattgaggtgtataccggctgttcgatcggcatcgcactctgccctgagcacggcaacgatctcgacagcctgatccgcagcgccgataccgccatgtacgtcgccaaggagcacggaaaacgcatctataccgtcttctcgccggagatgaacaaacgcgtcgccgagtacatgtggctggacaccaatctgcgcaaagggttggagcaaaatcagctggtgctgtattaccagcctaaaatcgacgcgcacagcggtgaagtgcacagcgtggaagcgttggtgcgctgggattcgccggagcgcggcctgatcccgccgctgcagttcatctcctacgccgaggagtccggcctgatcggcccgttgggccaatgggtgctgcaaaccgccgccgggcaggcggcgcagtggcaagagcggggattgaatctgcgggtggcggtcaacctctctgcccgtcagctggccgatgacagcatcgtcaacgacctgctcggggtgctgcaccgtcaccgcatggccccctgtctgctggacttcgagttgaccgaaagcagcctgattgaagacgagaatcgcgcgcgcgcgctgatcacccggctgcgcgaactgggcgcgcaggtgcatcttgacgactttggcaccggctattcgtcgttggcgcagctggcacgcattcctctggacgccatcaagctggataaaagcttcgtgcgcggggtgaatttcaatccggtatcgcaatcgctggtacgcgcgatcgtcgcggcggcggaggcgttggccttccgcgtgatcgccgaaggggtggagaccgagagcgaaaaccacttcctcgacgaagtcggcgtggacgaaaaacagggctttctgttcgcgcggccaatgctcccggaacagctggagcattggctgcagtcctatcgcccgcgctcaccctccgcatgaggcgggcgcgttaacgttagccggcacgacgcaggttcagggtatggcgatcctgcaacatcaccagtcgctcgatgtaggcacggtctttttcctcaatggtaaaggccgagtgcacccaatcttcggtaatgtccatcagctcggaacgcgtcagctgcaacacgcgctgacgcgcccgcagcatggcgcgcatgccgttgagcttcggccggatggtatcgataaaggtgcgcgtcgccaggtaagcgtcgccgggctggaacagctggtctaccagcccgcggctctcgaaccactctgcggtgtgcgactcgccgccccaaatcagctcctcagccaagcgcatgcccgccttgcgcgccaccagcgagtacccccccatgccgggaaacaggttgaacgcaatctccgggaaccccatgcgcgcattgttttgcgccaatacgaaatggtgcgccagcgccgcttcaaaaccgccccccagcgcactgccttcaaccatcgcaatgctgaccgcgccggtgtcgaaaccgcgcgccgccgcatgcacgcagtcgatgcaggcgcgcgcgtaggccatcatcgcctcgcgcttgcggtttttgatcgcttcggcgaagaactgcagatcgccgccgacgttgaacatgttcggcaccagcgagccggtgacccagaagtcgaaccgcagcgaagactccttcgccgcctgcgccagcgtcatgatgtcttcaatcaatgcctggttgaagcaggggcgtggcgcagcgcgcagcagcatccacatgatgtgccgcccctcttcatagtaggcggagatctgcgacagattgcccgcttcggtaaacggacgacaggtggggtgattaagcaatttcataagaccttccagtttttctgttgatgacggatgagaccgttccagcccctacggctgcagcggagcggcgagcggcaaagcgcgacgccacatcatgagtaaacgctttctcgccgacgaaacagataaaaattggaggtagagaagtgaaaaaaaccgaggcgccacggggttttcataggaattttacctatcgcgccatccccggcatttcatgccgggcgctaacgcgttaagctcggaaattgaccgtttgccgccccggcgctcaaaacgccgcagggctttggctataatcaacgctgatacatgccgtttaacgttaaggaaatcgtgaagtaatgcctacaggaccagaccaggaacgccgccagcccgcacaagacacgccgccgaagccgcttatcgccatcaagaccggccatgagacgctcgaccgccgcattagcggtttttcacgtctgattgaacgcatcaaagcctggccgagcgtggcgcacctgctgcgcgccgccgaacgctttaacgatcggctgggcagccagttcggcgccgccatcacctatttttcattcctctcgctgatcccgatcctgatggtgtcgttcgccgccgccggtttcgtgctggcttccaacccggatctgctggcccgcttgatcaaccggatcgtcggcagcatcagcgatccgacgctggccagcacgctgaagaacaccgtcaataccgccattcagcagcgcaccaccgtggggttgaccggcctggcgctggcgctctattccggcatcagttggatgggcaacctgcgcgaagcgatccgcgcgcagtcgcgtgacgtctgggagcgcaatccgcaggatcaggagaaaatctatttcaagtacacccgcgacttcatctcgctgaccggcctggtggtcgcgctgatcatcacgctgtcgctgacctcggtcgccgggtcggcgcaggcggcgatcgtcaacgcgctggggctggacggcatcgaatggctgcggccggcgctgacgacgatcgcactgtcgatctcgatcttcgccaactatctgctgttcctgtggattttctggatgctgccgcgccacaaaccgaagaaaaaagcgctgctgcgcggcaccttgcttgcggctatcggctttgaggtgatcaagttcgtgatgacgatgacgctgccgcaggtggcgaaatcgccttccggcgcggccttcggctcggtgatcgggctgatggcgttcttctacttcttcgcccgcttgacgctgttttgcgccgcctggatcgccaccgccgactacaaaggcgacaaagccgtgccggaacgcgagccgccggcgcgctgaagccatgcgatcgtgccggtgttatcgcacacaccggcactttcctctggatatcagccagaaaaccagtcaatacgtctaaataacgcggcacgcgatccgaaaaaccagcataacagactacccaatcacttttctttgccgcttttacagccattccctctgtacgaaagccctttctcaacgtttaacgctgcagaaaacaagccagataaaacattagtctttttaaccggttagccgggtcattgcccaaagttcccgcgttgaaaaggccgaatgctgtcactaagatggatttttaccccctccaacaataagaaatagatatgcaagccaccatcgcacccccactcgacgccgacgacgcgtccacaccggtgaactcccgcgggaaagtcatcgtcgcctcgctggtcggcaccgccatcgagtttttcgacttctacatctacgccaccgccgcggtgatcgtgttcccgcacatcttcttcccgcagggcgacccgaccaccgcgacgctgcagtcgctggccaccttcgccgtcgcctttgtcgcgcgccctatcggctctgcgctgttcggccacttcggcgatcgcgtggggcgcaaggtgacgctggtcgcctcgctgctgaccatggggatttccaccgtgctgatcggcctgctgccgagctatgaaaccatcggcatcttcgccccgatcctgctggcgctggcgcgctttgggcaggggctggggctgggcggcgaatggggcggcgcagccctgctggcgacggagaacgcgccggccaaaaagcgcgcgctgtacggctccttcccccagttaggggcgcctatcggtttcttcttcgccaacggcaccttcctgctgctctcgtggctgctgagcgaccagcagtttatggaatggggctggcgcgtgccgttcatcctctccgcggcgctggtgctgattggcctgtacgtgcgggtatcgctgcatgaaacgccggtgttcgccaaagtggccaaggccggcaaacaggtgaaagtgccgctcggcacgctgctgagcaagcatctgaaagccaccatcctcggcaccttcatcatgctggcgacctacacgctgttttatctgatgacggtgtattcgatgacctacggcaccgcgccgcagccgctcgggctcggttactcccgcaacagcttcctgtggatgctgatggtggcggtgatcggtttcggcgtgatggtgccgatcgccggtctgctggcggacgcgttcggccgccgcaagaccatgatcgccattaccctgctgatgatcggcttcgcgttcctgttcccgaccctgctgggttccggcaaccaggcgctggtgatgggcttcctgctgtgcggcctgagcatcatggggctgacctttggcccgatgggcgcgctgctgccggagctgttccctaccgaagtgcgctataccggcgcatcgttctcctacaacgtcgcgtcgatcctcggcgcgtccgtggcgccttatatcgccacctggctggcggcccactacggactgttctacgtcggcatgtacctggcggcgatggccgggctgacgctgctggccctgctgctgatgaaagaaacccgccatcagtcgctgtgatcccctacggccccctcactgcgggggccgcacgcggtgttcgtttcctgtcataaaaccgggctatgctgaatgtttctctcggtaacaggatcggccgatgtctctgcgtcgtggggtatttgtctgcgtggcgctgctggcggctatcgccatcgcgctcttttacgggttgaaacccgaccatcccgatgcgctgtggcgcatcgtcagccagcaatgtctgcccaatcagcaggcgcacgacaacccggcgccctgcgcgcaggtggatgtgcaggccggtttcgtggtgtttaaagatcgcaacgggccgttgcaatacctgctgatgcccagcgccaaaatcaccggtatcgaaagcccggcggtgctggacgccgccacgccgaatttcttcgcgcaggcctggcgcgcgcgccacgtgatggcggaacgctatggcaaaccgatcgacgacggcgatatttccctggcgatcaattcggaatatggccgcacgcaaaaccagctgcacatccatatctcctgcctgctgccggcggtaaaacagcggctggcgcaaatcggcccccatttcatcaagcaatggcaaccgctgcccggcggcctgttggggcatgactatctggggcggcgggtgaccgccgctgaactggaacaacagggcgccttccgcctgctggcctccggcctgccgcgcgccgacgggcgcatgggcagcttcggcctggcgatgaccgcgctgccggacggcgatttcctgctgctggcaaccgagcgcagcctgctgccgttcaccctggcctcggcggaagagatccaggatcacgactgccggctgctcacgccgccgccgcgcgcctgattattttttgcctttcatctcccgcaggatctgcccgcacgggttctcctcgccgccttcactgggcgagaccagcgccagcagcgccgccgcaggcgtcagcactgcccctaacgccaccgccgccgcgccgcgcgcgatcagcggcccggctttgaccccggcgtccgggtgcttgaaggtgcctttcacgtacagcggcgaacgcagagtcagcacgcgcatacccttgctttccggatcgatggacaaatccagccgttcggtggcgaggttggtgttgccagtgatgttgatcaccgcgttttcggtgtcgaacacaaacagtcgcggcgcggcgacgccgctgcggatgccgacgtccgccgccgcgcagttgatgcccaccacgtcgtcaccgaacagctgcgccaccagatagttaccgacgttcagaccgaggatctccatcaggctgcggctgatcaccccgttattgatcagcaggcgcaggtcgccgttgctggtcgccagcagctcggccaccgaattaccgctgcccgtcaacctggcgtcgccgttcatctgcccgaggctgcgcttcatcgcctccacgttcggcaacagctgtttaagctgaagtttgcgtgcatgcatatccacctgcccgcgcatcggctttttgccgccgtcgaggcgcacgacagcgttcaggctgccgcccgccatgccgaagcgcagcggatccaggcgcagttcgccattgttcagcttcaggtgcgtggccagatcgctcagcggcaaatcgctgccgcgttcaatgcgcgcggcggcaaacttcacgtccgcatccatcttgctccagctttgcgtatcgaactgttcgaccggcagcaccttatccgccggctgacggcttttctcgccgcgcccggctttggcggcgttggagtccgcgccgatcagcggcgccagatccgccaatctcagctgccgggagttcaccgcgccgctcaacgtgggccgcggtttaccggcaacgtacttcaagctgccgtgaatgtcgctgtcgccgatttttccgtcgaatttctggtactcaaacaccgcgccgcccggctgatgcaggcgggcggtcagatggccatcggtcgcatacggcggggtattcggcaacaacacgccggtcaggccatagaggttgctcaggctttcaccggaaaatttcagctgtacatccaggccgccgaggttcagcggatcggacaaggtgcccgcgaccaccacccgggtgctgccggagcgcacatcggcctgcagcgggaagggcaaatcggcgctctgcagcgacagcatgccgccaatcttgccgctgccgctcaacggctcgccgttatatttgcctttcacctgccagccgaaaacgtaatcgggggtggcggccttgtcgccgccctgtttgccggtcacttcactgaacggcaacggtttgccgagcggatcgatgacggcgcggaaatccgccttcagcgtggcgtctttaaaggcgatctgccccttgtcgaatacgatgtcatgaacggtgaacgaccagtcggaaggcggctgcttgggatcctggccggcggccaggtcaaacgtccagttgttgtcgccgttggccaggcgttgcaacgaagcattcggctgcttcagccagatacgcgggatcagcagctctttacccagcagcgccagcggcgcaatgctggcgtcgacgcgctgcagcgtcaccatgctgtcgccgggcatgtttttcggattacccagccacacgtcttcggcgtgaatatgcggccagggcacccaggcgcgccaaccgccctcatccggattgcgcgaccagtcgacgcccagatcgccgcgaatggcaaacggtcgccgcagttcggccgacactttgtcgttgatggtgggcttgagtcgattccagtcgaaggtcgcgatgaagatcgccagcgcgacgatcagcagcagcacaatgccgcccagccagctgaaaacctttcctgttcttgtcatagcggctccctcagcgcataaatcgggctgccgaatgaaaggaaaaggagttagcagccccgtttaagcctagctgaggataggccggagttcacgccggcgcgccgggcgcggcgaacagcgtcggcacgctgtgcagcgtttcaaagcacgccgggcgggaaaggtagtagccctgggcggccaacgcgccggaacgctgcaccagccgccactcttgttcggtttccacaccctcgacgatcaccccgtcgctgtgctggttcatcatcttgatcagggtgccgagcagctggacgccctcttccgactgtttgagcaaggtaaacaattcacgcgccaccttgatgtattgatagcgccaggcgccgacggcggagaagttggccagcccgctgccgaaatcgtccagccacagccgctcgccgccgacgatctgctgcagcgggcggtttgacgccgttgcggcgtgctccaccagctcgaagcgcagatagggcatctcggcgatctgccgttgcaaggcgctatgacgctgtaatgcttgcagcgcgatgccgtcgatattgaccgacaccatcaccgcatggcgggtgaacaacgcctgccagcgctgcaacagcgccagctgttcctgaaccacccgcaaacgctgggcgacgccgagcgaggcaaaatagtgttccggggattgccgcttgtccggctcattcgggtgatataccgccgtcagcagttccaccgccaacagcgcgccgctggtgcgataaatcggctggaaggtatacaagcgccggcattgccgccagtagcgccgcgatttggcgcaggcatagagggcaaaacagggcgccagcagacccgagatcagattggttatcatcggtactatcgccgtggcggggaagtgagagcgctgccgctgtttctttacccaacttatcggccacgccgcgtaaaactttaagcacgaattgccgcacgctttcctcttcaccctgttggcgttggccgatcgcgatcataaaaaattaaaacaccattttaatttattgactctcttaccgccttgcgtggagactggtggctgttgcttcttctttagccagggcttattgacgatgactatccgaaacctcgccgtgatcggcgaatgcatgatcgagctgtcgcagcagggcgcacagctgacgcgcggctttggcggcgataccctcaacaccgccatctacctcgcccgccaaatgccgaaacagacgttgcaggtgcattacgtcactgcgctcggcaccgacagcttcagcggcgagatgctgcaggcctggcggcaggagaagatcgagaccgggttgattcagcaattcgacaacaagctgccgggcctgtacgtgatcgaaaccgacgccgccggcgaacgcactttctactattggcgcaatgacgccgccgcccgctattggcttgctggaccgcaggccggcgcactgtgcgcgcggctggcgctgttcgattacctgtacctcagcggcattagcctggcgatcctcgcgcctgccgaccgcacgaagctgctggcgttgctgcgccgctgtcgcgccaacggcggcaaggtgatcttcgacaacaactaccgcccgcgcctgtggccaagccgtgaggaaacgcagcaggcctaccgcgaggtgctggcctgcaccgacatcgcctttttgacgctggatgacgaagaattgctgtggggagcgcagccggttgaacagatagtgacgcgcacgcaggcgctcggcgtcggcgagatcgttatcaaacgcggcgcggatgcctgtctggtgttcaatgtggagggggagcggcttgaggtgccggcgatcgcgctgccgccggagcgcgtggtggataccaccgcggcgggcgactctttcagcgccggctacctggcggtgcgcctgaacggcggcggcgcccagcaggcggcgcagcgcggccaccagcttgctgcaacggtgatccaacatcgcggcgccatcattcccgcagcggcgatgcccgcataatcaataaggcggcggcgaagtcacccccgccgcccacgcaatggatcccagaagcattgatcagaggatgattgaaagaatttccctggcgttggcttatttccgcccagagctgctaagctcgggtcttggcattgccgtctttttgaatttattagccgagtataaatttcaatccgccgcactgactagctggactttggtgcaggtcgggttgagccgccgaacgacagggaggttaccgatggccgccacattcgccaacgccgtcgccgcaagactgcatcttgacggccggctacaggccttcagccaattcaaatacgcttacctgaccttcaacaaacaccatcccgatcgccatttgctggtatcgaactacccgcaagaatggctggacatctacagtgccaatcgctatcagcacatcgatcccgtcgtgcgcgccgcccatagccgctgtgcgccctttatgtggcacgacaccgccctcactaccgaggatcggcattaccggaagatcttcagccaggcgcgggagtacgacatcgtgcacggttgcagctttgttttgcacgatcacgacaacaacctggcgatcttgtcgatcagcgcgacggcggccgatgacgccgaactgcggcagctaatggcggaagaaagggccagcctgcagatggtcttggtcgatacccaccagcacgcgtttgcgttggccagcgccgaggctggccgaaaggatcggctctcgccgcgcgaaggggaaattctctattgggccagccagggcaaaacctataacgagatcgcgctgatcctggggatcaaaaccggcacggtgaagtttcacatcggcaatgcggtgcgtaagctgggggtcgccaacgccaaacacgcgatccggcgcggccttgaacggcaactgatcgcgccgccgcaggcataaaaaagccggcattgcagccggcttttgttttttatcttgcggaaaatcagcccgcaacggcgatacgtttcatgtcggtcatgtagccacgcagtttgcggccgacggtttcgattgggtggctgcgcaccgcttcgttcacgtcgcgcagctgcgcgttgtccaccgccgtacccgccacggctttgcccaaatcgcccgcctgcagggtggtcatgaagtccttcagcaacggcaccgctgcgttggcgaacaggtagttgccgtactccgcggtatcggagatgaccacgttcatttcatacagacgcttacgcgcaatggtgttggcgatcaacggcagctcgtgcagcgactcgtagtaagccgactcttcaatgatgccggcatcgaccatggtttcgaacgccagctcaacgcccgctttcaccatcgccaccatcagcacgccatgatcgaagtactcttgctcgctgatcttgccttcaaactgcggcgcattctcgaacgcggttttgccggtctcttcgcgccaggtcagcagtttcacgtcgtcttccgcccagtcggccatcatgccgctggagaaggcgccggaaatgatgtcgtccatgtgcttctggaacagcggcgccatgatggttttcagctgttcggacagcgcataggcacgcagcttggccgggttggacaggcgatccatcatcagggtgatgccaccctgcttcagcgcttcggtgatggtttcccagccgaactgaatcagtttctcggcgtaagccggatcggcgccttcagcaaccagcttgtcgaagcacagcagagaccccgcctgcagcatgccgcacagaatggtctgctcacccatcaggtcagatttcacttcagcgacgaaggaggattccagcacgccggcgcggtggccgccggtcgccgccgcccaggctttggcgatcgccatgccttcgcctttcggatcgttttccgggtgaaccgcaatcagggtcggcacgccgaagccgcgcttgtactcttcgcgcacttcggtacccgggcacttcggcgcgaccatcaccacggtgatgtctttgcgcacctgctcgcccacttcaacgatgttgaagccgtgggaataccccagcgccgcgccgtctttcatcagcggctgcaccgcacgcaccacggaagagtgctgcttgtccggggtcaggttaaccaccagatccgcccgcgggatcaaatcttcgtaggtgccgaccttaaagccgttttcggtcgccttgcgccaggaagcgcgcttttcgtcgatcgcttctttgcgcagggcataggcgacatccaggccggagtcacgcatgttcagcccctggttcaggccctgggcgccacagccgacaatcaccacttttttacctttcaggtagccggcttcgtcagcaaattcgtcgcgcgccataaagcggcatttacccaattgcgccagctgctgacgcaggttcaatgtgttgaaatagttagccatggtggtactccggtttgatgttgtcttgcattgttattttcattccccgccctgtctgtgcggagattcgttaaactcaatgtataacaggaaatgcgttgcttaaattgatatattgagaacgtgatattgcaatttttgcaacactctcactgcgagcgtatcgatatggatttacgtgatttaaagctgttcctgcatctggccgaaagccatcacttcgggcgcaccgccaaggcgatgcacgtcagcccgtcgacgctctctcgccagatccagcggctggaagagatcctcgggcagccgctgttcctgcgcgataaccgcaccgtgcagctcaccgacgccggcgaacagctgaaagaattcgcccagcaaacgctgctgcaatatcagcagctgaagcactcactcggccagcacggcccttcgctgagcggcgaactgcggctgttctgctcggtgaccgcggcgtacagccacctgccgccgatcctcgatcgcttccgcgcgcagcacccgctggtagaaattaagctaaccaccggcgacgccgccgacgcggtcgacaaggtgcagtccaacgaggccgatctcggcatcgccggccggccggaaacgctgcccgccagcgtggcgttcaccaaaatcggtgaaatcccgctggtgctgatcgcaccggcgctgccctgcgcggtacgcagccaggcgtttgccgacaagcccgactgggccgagatcccgttcatcctgccggaacacggcccttcgcgaaaacgcatcgagctgtggttccgccgccaccgcatcagcaatccgctgatttacgccaccgtcggcggccacgaagcgatcgtgtcgatggtcgctttgggctgcggcatcgcgctgatcccgagcgtggtggtggataacagcccggagccggtgcgcaaccgcatctcgcagctggataacatctcgatggtcgaacccttcgagctgggggtctgcgtccagaaaaagcgcctcagcgatccgctgatcgacgccttttggcggttgctgcatccccgctgacgcgaggtttacagatccgccggatcgatctgcttcatcgtctctacctgcatcagccagtggtagagcggctcaagctgcaaaaatgccccggccagctgcggcgccagatcggcgctgaacagcttttccacttcgctgtcggtcaccatcaccgcaaacgacttgcggttataccaggtggcgatctccgccgcctgctccttcaccagcgggcgcttgtagctttcgcccaccagctcgaacggcggccggcagcaggcggccacctcaaggaaaggctgcggccgctgcctcagcgtatggcggaacagatccatggtcggcttgttggcgctgtagtagccgagcccatagcgcaacatgtccggccccagttcaaaaaaatacaccggcgcatctttccagtctttgctcgggcgcttgaacgtcagccacatgcggctgcggtagcgcgatttatcatgagaaaagcgcgtatcgcgatgaatgcgcgacagcgttttgccgatcgccgggcgagtctcgaactgcggatcgatcgccaacatgccgggagccagctgctccaccagcgcgcggaacggcgccagcagctcgcgatcgtagatgtcgcggttgccgtcgaaccacgccttatcattctcaatccgcacctgctgcaggaaattcaggccctgctgactaaagccggagaagggttgcgtcataagcttttccgttctgacgatttatcgggtgttgcgcagatcttccctctgccaacggcgtttgataaacacgcgccgacgcgtgcgaaaataagcgacatacaggtagaacgccgcccgattgctgaatagcgcaccacccaccgcgccccccagcaacatggcaccggtggcgatgccggtcatgcccgtcgcccacgctactgcggcgccaaggcaacacagaccgagcatgccaagatagtattgcagcaataccactccgctgtttttcccctgcaccagttggaacaggatcagcgtcatccacaccgccacgatcgcgccgctgcccatgagaacggcggcggaagtcttgccgctccaggcggccgccacgtccgtggccaggcccatcacgcccgccagccccagcgtcaggcataccatcagcaacatgacattgccgacgcccggcggtgacagccgctggcccggcgtcaggaaatgctgctcaagctgcgcatccacgccggcgaaaagcgcgcgatcgcgcgccgcgatttggctttccatctcccggccctgcgcgatcaggcgtttaatcatccagtccgccattacctcaccatctgcggcaatttctgcataatgcccacaaaatactgcccggtggttttcacattcaccggcgcagacagggtgccgctgatgccgctgcccacgaacgttaacgcgttattgagcgccgaatgcaattgctgacgcagcccgttttggatcgcttccgtcgggtaacgcttcgggtataagccgttcttcaccatttctttcaagacgttattggaaatccccggattttccgctcgaatgatgttttcggtcagccgcttcctttcgctgcggggcatgcttttcagccattccgtcgccttgcgcgccgaaatgcggcgcatggcgcggtaggtcatcgtcgcttccttcagggcggctcccgcgctggccagcgagatcacatcgagtacggtgctggtggcgatataccactgctcagagtcgagctgcgccaattcatcgcctttcccgtcatacagcttgttgacacggtatagcccattgccgcactgcagcgcgctggcggccatgccggcatagcccagataagccaccgcagagctggtgccgccggtgaacggcacggcgacgctgcccgacgccagtaaaaataccgataccagcagcgttccgcacgacagcgcggccgaggccaactctttgctgacgctgggtttgctcaacgcttccgacagcgtattggtcgcggcaacgcgcgaggtatgagccaccgttttgctgatgaccacgtgcgtgacctgcgaagcgttcgaataaccggtgtgctgcgtcgggcggactaaaaatgagttttgcccgtcggaaaaaataattcccacgccatgaaaagcgaggctgcagtccagcgagtcctgcaaggcttgcagattaatatcgcgatagaattcttgtaccccggcattgcccaacaggcgggcaaattcggcgttggtcaaatcgtcttcgggagaaccgaacggcgtagaaaaagcggttttcattgtcgtgcatccctatacgtcagaagtcttggcagtataaaaatgcacgacaaaatcacaaccatgcaacccataaactgactaacgcgtcacggttgcttatcaatccggctcatccctgcaaaaagaagcggaacgccgggttgtcggtttcgtcgtggcaatcgtagcccagcgcctgcagatgccgctcgaattccggctcgctttgcgccagctcgaaggccgccagcacccggccgaagtcggtgccgtggctgcgatagtggaacagcgagatgttccagtgcgtgcccagcgtctgcaggaacttcagcagcgcgcccggcgattccggaaactcaaagctatacagccgttcgcgcagcggcttcgacggacgcccgcccaccatgtagcgcacgtgcagtttagccatctcgtcgtccgacagatccaccacctgataaccgtcggcgttgagttcgtcgatgatctcccgccgttcggcgtggccgcgcgtcagccgcacgccgacgaaaatgcaggcgttgtcggcatcggcgtagcggtagttgaattcggtcaccgagcggccgcccagcagctggcagaacttgaggaagctgccctgctgttccggaatggttaccgccagcagcgcttcgcgctgttcgcccagttcgcagcgctcggaaacgtaacgcagcccatggaagttgaggttggcgcccgagagcacgtgcgccagacgctcgccctgaatgttgtgctgctggacgtactttttcagccccgccaacgccaacgcgccggaaggttcggcaatggcacgcacgtcctcgaacagatctttgaccgccgcgcagatagcgtcgctgtccacggtgatcacgtcgtccagatactcacggcacaggcggaatgtttcgtcgccgatgcgcttcaccgccacgccttcggcgaacagcccgacgcgtgccagatccaccggatggccggcatccagcgccgcgcgcagacaggcggagtcttccgcttcgacgccgatcactttgatctgcggcatcagctgtttgatcagcaccgccaccccggcggccaggccgccgccgcccaccggcacgaaaacccgatccagatgcgcgtcttgctgcagcagctccatcgccagcgtgccctgcccggcgatcaccgtcgggtgatcgaacggcggcacgaaggtcatgccctgctgttgggaaagttcaatcgccttcgccttagcctcgtcgaaattggcgccgtgcagcaacacttcgccgccgaaaccgcgcaccgcatccaccttgatgtccgcagtggacaccggcatcacgatcagcgttttgatccccagccgtttaccggagaaggcgacgccctgcgcgtggttgccggccgaagccgtcacgacgccgcgcgccttctgctcttcgtccagcccggcgatcatcgcataggccccgcgcagcttgaagctatgcaccggctggcgatcttcgcgcttcaccaaaatggtgttgccgagacgcgaagagattttgctcatggcctgcaacggggtgacttgcgccacctcgtaaaccggcgagcgcagtaccgctcgcagatattccgcgccgcagggggcgctgggtaggggttgagagaccgccatgctgcttatccccccagtttgctcttgtcgcgcaccgcgcctttatcggcgctggtggccaacgaggcgtaggcgcgcagcgcgaaggacacctgacgctcacgatttttcggcgtccaggccgcgtcgccgcgcgccagttccgcctcatgccgcgccgccaactcctgctcgctgacatccagctggatgccgcgatgaggaatgtcgatcgcgatcatgtcgccgtcctgcaccagggcgatcaggccgccgttggccgcttccggcgaagcgtgaccgatggacaacccggaggtgccgccggagaaacgcccgtcggtgatcagcgcgcacgctttgcccagccccatcgatttcaggtaggtggttgggtaaagcatttcctgcatgcccgggccgcctttcggcccttcgtagcgaatcaccactacgtcgcccgccaccactttgccgccgaggatcgcttctaccgcgtcgtcctggctttcatacactttggccgggccgcggaaggtgaggatttccttgtcgacgccggcggttttgacgatgcagccgttttccgccaggttgccgtacagcaccgccaacccgccgtcctgactgtaggcgtgctcacgggtgcggatgcagccttccttgcggtcggtgtccagcgaatcccagcggcagtcctgagagaatgcctgcgtggtgcggataccggccggcccggcggagtacattttcttgacgctttcgtcgcgggtcagcatcacgtcgtaggcctccagcgtctgcggcagggtcagccccaatacgttgttcacctcgcggttcagcaagccggcgcgatccagctcgccgaggatgccgattacgccaccggcgcggtgcacgtcttccatgtgatatttctgcgtgctcggcgccaccttgcacaggtgcggcactttgcgcgacaggcgatcgatgtcttccatggtgaagtccacctcgccttcctgcgccgaagccaacaggtgcagcacggtattggtcgaaccgcccatggcgatgtccagcgtcatggcgttttcaaatgccgccttgttggcgatattgcgcggcagcgcgctctcgtcgtcctgctcgtaatagcgtttggtcagctcgacgatgcgcttgccggcgttgaggaacagttccttgcgatcggcgtgggtggccagcagcgaaccgttgcccggctgcgacaggcccagcgcttcggtcaggcagttcatcgagttggcggtgaacatgccggagcaagagccgcaggtcgggcaggcggaacgctcgatctgctcgctgtcggcgtcgctgacgttcgggttcgcgccctggatcatcgcgtccaccagatccagcttgatgatctggttggagagtttggttttgccggcttccatcgggccgccggagacgaagatcaccggaatgttcaggcgcaacgccgccatcagcatgcccggggtgatcttgtcgcagttggagatgcacaccatcgcgtcggcgcagtgggcgttcaccatgtattcgaccgagtcggcgatcagctcgcgcgacggcagagaatagagcatgccgccgtggcccatggcgatgccgtcatccaccgcgatggtgttgaactctttggccacgccgcctgaagcttcgatctgttcggcgaccagtttgcccagatcgcgcagatgcacgtggcccggcacgaactgggtaaaggagttgaccacggcgatgatcggcttgccgaaatcggcgtcggtcatcccggtcgcgcgccacaatgcgcgggcacccgccatattgcggccgtgggtggtggtggcggaacggtacttaggcatgctcttttcactccaaatgtatttatggcaggcggcgaacgaaccgcctggatatttcttatcttgtctgtcttgtcgtccgccacgctgcgcggcgagccttgtcgttacgggtttaccggatccagccaaccgtacttgtcttcggtcttgccggtgaacaggccgaagaacgcctgttggatctgtttggtcaccgggccacgtttaccgataccgacctgaatgccgtccacgctgcgcaccggcgtgatctccgccgcggtgccggacatgaacacttcatcggccaggtacagcgattcgcgcgacagcacctgctcgcgcacctcgaagcccatgtctttcgccagcttgatgatcgcatcgcgggtgatgcccggcagcgccgacgaggtgaacggcggggtgtagatcacgccgtctttcacctggaacaggttctcgcccgccccttcggaaatgtagccgtgcacgtcgagcgcgatgccttcctgatagccgtggcggcgcgcttcgctgcccaccagcagggaggaaagatagttgccgccggctttggccgcggtcgggatggtgttcggcgccgcgcggtgccaagaggagaccatcgcatcgataccttgctccagcgcctcttcacccaggtaagcgccccaaggaaacgccgcgataatcacgtccgttttataaccggccggcgggttgacgcccatgccgacatcaccgacgaacaccagcgggcgaatgtaggcgctgaccagattgttcttgcgcagcgtggcgcggcaggcttccatcagttcgtcgacgctttgcgaaaccggcatgcggtagattttcgccgagtcatgcaggcgctgcatatgctcgcgatggcggaacaccaccggccccaagtgcgagtcgtagcagcgcaccccttcaaataccgacgtgccgtaatgcaacgcgtgcgacatcacgtgcactttggcctcggcccaaggaaccatctcaccattgaaccaaatgtaatcggctttcttagtcattgttatttatccttctcggcgcctcaggcgcgtatttgttgtgatgttggctgctggatctcgacgcaggagacgtccatcagtttacttaattgagatgacaacaaggcaaccgggcgcgggctggcaacggtcaattcgatattgatgctgtcggcgttggccggggaaaccatattcatagcacaaacctgaaagccgcgatgacgcacgacccgcaatacgcgctctaacatttcggggcgaaaacgcgcctggatcgagagttgatgctgcatcatgatatttcctccaacatggtttcgttgccggcgcccggcggcaccagcggccagacgttttcgagttcgtcgatagagacctgcagcagataagggccttcggtgttgaacagcgcctcgagggcgccctccacctgatccttgcggctgatgcgctggccgggaatgccgaaggcggcggccaacatcaggaagtcggggttatcggacaggttggtttcgctgtagcggccgtcgaagaacagctgctgccattgacgcaccatcccgaggcgctggttgtccagcagaacgattttgagcggcagctgcttgcgcttgatggtgcccagttcctgcacgttcatcatgaaggagccatcgcccgagacgcagatcaccgtatcttgcgggcgggcaatctgagcgcctaccgcggccggcacgccgaatcccatggtgccgaggccgctggaggtgatgaaattctccggacgctcgaacgtcatgtgctgcgcgctccacatctggtgctgaccgacgtcggtggtcactacgctgttggccggcttgcgcgcggacagctggcgcaagaacagcggcgcgtagatcggctggccagggtgatcgtagcggcaggcgtgctcggctttcagcgccgtcacctgctgctgccaggcggcgatgtccagcgggcgctgcaacgccggcagcaatgctttcagatcgccctgcagggccacatgcgcctggcgcagcttgctcatttccgccgggtcgatatccatgtggatcactttggcgtgcggcgcgaaggcgttcagcttgccggtcacgcgatcatcgaaacgcgcgccgacggcgatcagcagatcgcattcctgcaccgccaggttggcggccttggcgccatgcatgcccagcatgccgaggtacagcggatcttgcgcatccggcgcgcccagccccttcagggtggcgacgttcggcatgcgggtcacggcgataaattcacgcagcgccggcaccgcctgcgccatgcccacgccgccgccgacgtacagcatcggtttgtgcgcctgcgccagcagcgcggccgcctcggccaacgccgccgccgggaacgccggcgcttcgtcaaccggcatcagatgcgggtgcaagtccccctgcgccagctggatgtctttcgggatatcgatcagcaccgggccgggacggccgcctgcggcgatggcaaaagcttccgccatgatgcccggcaaggcgtccagcgactccaccaggaagctgtgcttggtgcaggccagagacaggccgagaacatcgatctcctgaaaggcatcggtgccgatcagcgcggaacccacctggccggtgatggcgacaacgggaacagaatcgagcagcgcatcagccaggccagtgatcaggttggtggcgccggggccggaagtggcgatgcaaacgccgaccttgccggtggcgcgggcgtagccgatggcggccatggcggcgccctgttcatggcggcacagcaggtgttccacgccgccgtcatacaacgcatcgtacaccggcatgattgccccgcccggatagccgaatacggtatccacaccctgcgcacgcaacgcttgaactacccactgagcgccattcatggttatttccccgcctttcttcgacaactgcaggattttgttctgtttttcatgctctgccccttgctccacttttctcttgccaataaaaaacccccggacctgacggtgcgggggttctcttgcgattccggcttgtttgctaagcctttcttcgtccaagtgcagccccgcacggtgggataataatcaccaccacgctaatcacgactaggctaatcacttgggcaaaggctttcataatgggtttgttcactgtgctcattcagaactaatgcttacagaggtaccacagccgcgcgcgacatgacaacactttttttgcgttattattcggcgcaatctggtcatacctcacgcgaatcgcccctctttcacacgttggcgcgcatacccggattttctaccgcgtcggtgatcgccttgccgcgcgtatccttgccgaagaacaccaacagggcgatcgccaccgccaccgtaccggcgacgatcgccatcgccagaccgtaattatgcccatgatgctcggcgatggtggcttgcagcgtggcgttgaccgaggcgatcaggttacccagctggtacacgaaccccggcagcaccgcgcgggtgttggccggcaccagctcggtcagataggtcggcaccacgccccaggcgccctgcaccatgaactgcatcaggaaagcgccgatccccaacatcagcgaaccgctggaaaacgcccacagcgggatcaccggcagcgccaacagcgcggcaatgatgatcgcttttttgcggccgatcttttctgacaacgaaccgaagaaaacaccgccgataattgacgcgatattgtagctaatggcgatgatactgacggttttagggtcgaaaccgtgctgaactttcagaaacaccggatacagatcctgcgtaccgtgggagaagaaattgaacgccgccatcagcagcaccagatagcagcacagcttccagtggctcttcaacaccggcagcaaggcggtgctctctttgcgttcacgcgccgccagccataccggcgactcctgcacgcaataataaataaacggcagcagcaggatcggcgccgcgccgatgacgaacatgccgcgccagccgaccgtttcgaacagcaggccgtacaccaccgccgccagcagataaccaaacggatagccggcctggaaaatacccgacatcaggccgcgtgagcggtccggtatggtttccatcgccaacgatgacgccacgccccaaatgccgcccatcgcaacaccgtacaacacccgcaacagcaagaagaccgtcagcgagggcgcggcggcggagagcagctcaaacaccgagaagaagacgatattcaacatcaggatcggtttgcggccatatttttccgccgcacgcccgaagatcagcgcgccaatcgggcgcaccgccagcgtgagcagaatcgccaacgtgacctgttccagaccgacgtgaaaggactgcgcgatatcgctgagtaagaataccagcacgaaaaaatcgaaagcgtcgagcgtccagcttgaaaagctggcgattgccgcgttgcgttgcagcggggtccaaccaaacatagtgttatccctaccgtagagtacgaagtcaggaggtttagcggctgccgggcagaatgcggcggcggtcggggcttgttaaagaagtgatttttcttttaatcaattgttaaatacacccgttaaccctatgattgcaatgtgtatgggccgctaatgtgttgcagccttcagcgaattgttaatgggtattgccgcaggatgcgaggcggctcgcacaatctcatttacttcgatgaaaatgagcaattacgctgcgaaacccctagaaaaaccaccaataacgccgcgcaatgccaggatgaatcacgcatcatgtcgtcctcagcaaggagagcgatatgtcactggcgttaatctatagccgcgccatcatcggcgttcaggccccttccgtgacggtggaggtgcatatcagcaatggcctgcccggcctgacgctggtcggcctgccggaaaccacggtaaaagaggcgcgcgatcgggtgcgcagcgccctgatcaacaacggtttcacctttcccgcccggcgcatcaccgtcaatttagcccccgccgatctgccgaaagaaggcgggcgttacgatctgccgatagcgctggcgatcctcgccgcctccgagcagttacccctcgcaccgttggcacgctacgagtttcttggcgagctcgcgctgtccggctcactgcgcgcggtcagaggtgccatcccggcggcgctggcggcggctgatgccgggcggcaactgatcctctcgacggacaacgccgccgaagtcggcctgatcgcgcagtcgcactcccatactgcccaacacctgctggaagtctgcgcttttctgctcggccaaggcgaactgccggtggcggccgcgccccccgatgcagacaacgcgtgcgaaaacgccgacctgcgcgacatcatcggccaggaacaggccaagcgggcattagagatcgccgccgccggcgggcataacctactgttggttgggccaccgggcaccggtaaaaccatgctggccagccgtctcacgggcttactgccgccgctgacggagactgaggcgctggaaagcctggcggtcgccagcttgcagcatcatattcccgccgctctaccatggcgtcagaggccgttccgcgcaccgcaccacagcgcctcgatggcggcattggtcggcggcggctcactgccgcgaccgggcgagatctcgatggcgcataacggcgtgctgtttctggatgaactgccggaattcgagcgtaaggtactggatgcgctgcgtgagccgttggaatccggcgagatcgtgatttcacgtgccaacgccaaggtctgtttccccgccagggtgcaactgatcgcggcaatgaaccccagcccgacagggcattatcagggattgcacaatcgcgcctcaccgcagcaggtgttgcgctatctggcccggctgtcagggccttttctcgaccgtttcgatctgtctatcgaagtaccgctgttgccgccgggtacgctcagtcatcggaaaccccagggagaaagcagcgaacaagtacggaaaagggtgcagcaggctcgcgcccggcagctcgaacgcgccggtaaagtcaatgcgctgttgagcaaccgcgaagtggaacgagattgcgttttgcaggcggctgacgccgagtttttggaagcaacattaaacacgctggggttatcggttcgcgcctggcagcgcatcttgaaagtggcgcgcacgctggcggatttggcgggagatgctgaactcgacaggcaccacctcagcgaagcgctgggctatcgcagtatggaccgcctgctgttacaactgcatcgcagtctggaatgaaaatggggcccgcaggccccatcgtctttagtcttcgctgtcgctgtaatcttctactgcgtcagcctgcggtttaccgccggacagagtatggaatttcttcgggcgacgtgtgcgcgccagatatttagcccatactttttcctgctcggtagccgcttcgcgctcaccgcggcacactgcgacgaacagctgttcttcttcagtggccggctggcgtttacccgagtccaactcgttaaacgcgtagccgaagcgctctagcaattgcgcctctttaatggtgaaatcgccgtgacgggagaacccgcgagggtaatgtttattatcaaaaaaacgattggtcgtggtgaagctatccgccatctgacacgctcctaattctcttatggccgtgctgtttatggcgcggagtattagataggcttgacagcgtgtaaaacaaaacatttaaatcttaacgacaaatttttttggagataggtgtggataccgaattactgaaaacctttttggaggtcagtagaacgcgtcactttggcagagccgcagaatctttgtacttaacgcagtccgcggtcagtttccgcatccgtcagttagaaaaccagttaggcgcaaatttatttacccgtcatcgcaataacatccgcctgacgcctgccggcgagcggcttctgccctatgccgagagcctgatgaacacctggcagttggcgaagaaggaagtcgtgcgttcgctgcaacacaccgagttatcgatcggcgctaccgcttcgttgtgggaggcctatctgaccccctggttgcaagcactctatcaacaacgcgaggcgctgcagctagaagccagggtggcattaaggcactctttggtaaaacaactgcatgaaaggcagctcgatttactgatcaccactgaaccgccgaagatggatgaattggccagccagcaactgagcaatttctcattacgcctgtactcatccgcttatcgtgacaaacaggccccaatgccctacatcaagctggaatggggagccgacttccaccaacaggaaaaccgcatgttggaaggtgataacgtaccggtgcttaccaccacctccgctcacctgacgcgtcagctgttggaaaccacgggcggatgcgctttcctgcccagccattgggaaaaagagtacccacagctggtggccgccagcgagatcccgccgattatccgcccactgtatgccgtctggttgcaaaacagcgatcaacagcctttgattcgacaattacttaaaatacctttaaataccgcagcctaaagcgctatggcggccttaaaagccgccaccgtggtcttggctgtctatcatgccaaaagccgcccatcgccttctgagagaagaaaatgcaaaatgtcgggagaatcaggagctccgcggaggtaaagatcgaaaggttatggagcaattcggatcagataaacatcagcatagaacagccgatgcgctcttttccaaaacgataacgcgctaaggaaagggataataggtaaaaaaaaaccctttgctttcgcaaagggttcttaatatggcaggggcggagagactcgaactcgcgacacccggttttggagaccggtgctctaccaactgagctacgcccctaaatctcgcttaacattatgcctgctaataaagcaggcataattaaataagtggcggaacggacggggctcgaacccgcgaccccctgcgtgacaggcaggtattctaaccaactgaactaccgctccaccgattcttttacgttgtatctttcgataccggcaatatcgcgctctgcgacttgcgcattaccagtcgtcacactgataacgtttatttgatgcctggcagtgtcctactctcgcatggggagaccccacactaccatcggcgctacggcgtttcacttctgagttcggcatggggtcaggtgggaccaccgcgctattgccgccaggcaaattcgttttaatcaacccgcttcatcgctgaagcctgtcaatccaatctgtaaacaagctgaatattgtcttggtctcaccaaaacaccttcggtgttgtaaggttaagcctcacggatcattagtactggttagctcaatgcatcgctgcacttacacacccagcctatcaacgtcttagtcttaaacgttccttcaggggccttaaaggcccagggaagactcatcttgaggcaagtttcgcgcttagatgctttcagcgcttatcttttccgcacttagctaccgggcaatgccattggcatgacaacccgaacaccagcggtgcgttcactccggtcctctcgtactaggagcaacccctctcaatcttccaacgcccacggcagatagggaccgaactgtctcacgacgttctaaacccagctcgcgtaccactttaaatggcgaacagccatacccttgggacctacttcagccccaggatgtgatgagccgacatcgaggtgccaaacaccgccgtcgatatgaactcttgggcggtatcagcctgttatccccggagtaccttttatccgttgagcgatggcccttccattcagaaccaccggatcactaagacctactttcgtacctgctcgagccgtcactctcgcagtcaagctagcttatgcctttgcactaacctcacgatgtccgaccgtgattagctaaccttcgtgctcctccgttactctttgggaggagaccgccccagtcaaactacccaccagacactgtcctcaccccggatcacggggccgagttagaacatcaaacattaaagggtggtatttcaaggatggctccacgcagactggcgtccacgcttcaaagcctcccacctatcctacacatcaaggctcaatgttcagtgtcaagctatagtaaaggttcacggggtctttccgtcttgccgcgggtacactgcatcttcacagcgagttcaatttcactgagtctcgggtggagacagcctggccatcattacgccattcgtgcaggtcggaacttacccgacaaggaatttcgctaccttaggaccgttatagttacggccgccgtttactggggcttcgatcaagagcttcgccttgcggctgaccccatcaattaaccttccagcaccgggcaggcgtcacaccgtatacgtccactttcgtgtttgcacagtgctgtgtttttattaaacagttgcagccagctggtatcttcgactggcttcagctccatccgcgagggacttcacctacatgccagcgtgccttctcccgaagttacggcaccattttgcctagttccttcacccgagttctctcaagcgccttggtattctctacctgaccacctgtgtcggtttggggtacgatttaatgttacctggagcttagaggattttcctggaagcagggcatcaactacttctgcaccgtagtgcatcgtcatcacgcctcagggttaatatgcaaccggatttaccaggtcacaccccctacacgcttaaaccgggacaaccgtcgcccggccagcctagccttctccgtccccccttcgcagtaacaccaagtacaggaatattaacctgtttcccatcgactacgcttttcagcctcgccttaggggtcgactcaccctgccccgattaacgttggacaggaacccttggtcttccggcgagcgggcttttcacccgctttatcgttacttatgtcagcattcgcacttctgatacctccagcaaccctcacaggccaccttcaacggcttacagaacgctcccctacccaacaacgcctaagcgtcgctgccgcagcttcggtgcatggtttagccccgttacatcttccgcgcaggccgactcgaccagtgagctattacgctttctttaaatgatggctgcttctaagccaacatcctggctgtctatgccttcccacatcgtttcccacttaaccatgactttgggaccttagctggcggtctgggttgtttccctcttcacgacggacgttagcacccgccgtgtgtctcccgtgataacattcttcggtattcggagtttgcatcggtttggtaagccgggatggccccctagccgaaacagtgctctacccccgaagatgagttcacgaggcgctacctaaatagctttcggggagaaccagctatctcccggtttgattggcctttcacccccagccacaagtcatccgctaatttttcaacattagtcggttcggtcctccagttagtgttacccaaccttcaacctgcccatggctagatcaccgggtttcgggtctataccttgcaactaatcgcccagttaagactcggtttccctacggctcccctatacggttaaccttgctacaaaatataagtcgctgacccattatacaaaaggtacgcagtcacaccacgaaggtgctcccactgcttgtacgtacacggtttcaggttctatttcactcccctcgccggggttcttttcgcctttccctcacggtactggttcactatcggtcagtcaggagtatttagccttggaggatggtccccccatattcagacaggatgtcacgtgtcccgccctactcatcgaactcacgacctgtgcattttagtgtacggggctatcaccctttactgcgcgactttccagacgcttccactaacacacaagccgattcaggttctgggctcctccccgttcgctcgccgctactgggggaatctcggttgatttcttttcctcggggtacttagatgtttcagttcccccggttcgcctcatgccactatgtattcatgacatgatagtgtgtcgaaacacactgggtttccccattcgggtatcgccggttataacggttcatatcaccttaccgacgcttttcgcagattagcacgcccttcatcgcctctgactgcctaggcatccaccgtgtacgcttagtcacttaacctcacaacccgaagatgtttccatcgttcgcgctgcaaacatttgagagactctatgacaggttactctttatcccaatacttctacggagggataaatttcagccgtcatgtttcaattttcagcttgttccagattgttaaagagcaaaatacttcgcagcatactgtcgccaatatactctgaagtattgaaataccggactatatggtggagctaagcgggatcgaaccgctgacctcctgcgtgcaaggcaggcgctctcccagctgagctatagccccatacagtcacgcgcagtaccttttccacttcataagaagtggtaggcctgagtggacttgaaccaccgacctcacccttatcaggggtgcgctctaaccacctgagctacaagcctataaaggtatttctgctcgttactttctatcagacaatctgtgtgagcacgccacgcgaactaatatctttaggtaaggaggtgatccaaccgcaggttcccctacggttaccttgttacgacttcaccccagtcatgaatcacaaagtggtaagcgccctcccgaagttaagctacctacttcttttgcaacccactcccatggtgtgacgggcggtgtgtacaaggcccgggaacgtattcaccgtagcattctgatctacgattactagcgattccgacttcatggagtcgagttgcagactccaatccggactacgacgtactttatgaggtccgcttgctctcgcgaggtcgcttctctttgtatacgccattgtagcacgtgtgtagccctactcgtaagggccatgatgacttgacgtcatccccaccttcctccagtttatcactggcagtctcctttgagttcccggccgaaccgctggcaacaaaggataagggttgcgctcgttgcgggacttaacccaacatttcacaacacgagctgacgacagccatgcagcacctgtctcagagttcccgaaggcaccaaagcatctctgctaagttctctggatgtcaagagtaggtaaggttcttcgcgttgcatcgaattaaaccacatgctccaccgcttgtgcgggcccccgtcaattcatttgagttttaaccttgcggccgtactccccaggcggtcgatttaacgcgttagctccggaagccacgcctcaagggcacaacctccaaatcgacatcgtttacagcgtggactaccagggtatctaatcctgtttgctccccacgctttcgcacctgagcgtcagtcttcgtccagggggccgccttcgccaccggtattcctccagatctctacgcatttcaccgctacacctggaattctacccccctctacgagactctagcttgccagtttcaaatgcagttcccaggttgagcccggggatttcacatctgacttaacaaaccgcctgcgtgcgctttacgcccagtaattccgattaacgcttgcaccctccgtattaccgcggctgctggcacggagttagccggtgcttcttctgcgagtaacgtcaattgatgaacgtattaagttcaccaccttcctcctcgctgaaagtgctttacaacccgaaggccttcttcacacacgcggcatggctgcatcaggcttgcgcccattgtgcaatattccccactgctgcctcccgtaggagtctggaccgtgtctcagttccagtgtggctggtcatcctctcagaccagctagggatcgtcgcctaggtgagccattaccccacctactagctaatcccatctgggcacatctgatggcaagaggcccgaaggtccccctctttggtcttgcgacgttatgcggtattagctaccgtttccagtagttatccccctccatcaggcagtttcccagacattactcacccgtccgccgctcgtcacccagggagcaagctcccctgtgctaccgctcgacttgcatgtgttaagcctgccgccagcgttcaatctgagccatgatcaaactcttcaattaaaagcttgatttgcttccactcgagaagcgatgctcaaagatttactgcatgaattttacttcagttagtcactcttcaagacttgatattttttgcatccgaagatgctggatatcgtcttgtggagtgcccacacagattgtctgataaattgttaaagagcagtgagttaggcgctttcgcttgctaactcgaggtggcgtatattacgctttcctctttcagagtcaaccctaattttcaggattttttctctgcgacccccggatactctgtcagtcgttgttcccggtcagtggaggcgcattatagggagttctcggcgagccgcaacccctattttcaatattttttccgaccgttgaatgtttaaccaaaacaccgttaaagcggcagttttttcaacgatttaaagccatagccctgcaaaacgggcaataaagcgtcagtatcttcatttaacgccatgcaatacgccagattctcttcctggctcgagaccaggctttcctgcgtagagatgagccaggcggtgcggcgggcaatcgccgcgccggaatccaccaatcgggtgccttccggcaacacctgcatcagctcttcagctaacagaggaaaatgggtgcagcccagcacgaccgtatccggcggctcgcgcatgctcagccacggatgcaggatcttcttcagcaccggcagcggcacggcttcgccatgcagcttggcttccgccagctccaccagttcagaagagcccagcagctcaatcttgcaatcggtggcgaaccgggaaatcagctcatgggtatagctgcgctgtacggtgccgcgggtcgccaacaggccgacaatgccgttgacggtaagacgagccgccggtttgatggcgggcaccacgcccacgaccgggaaactgaaacgctcgcgcagggccggcaaggagaccgtgctggcggtgttgcaggcgatgacgacaatcgccagaggatgacgctgctgcaccgcgccgacaatctccagcacgcgcccaacgataaactcttcggacttctcgccgtaggggaacgccacgttgtcgaacgcgtatatatagtggagatccggcagcaactgccgaatctcctgatacaccgacagcccgccgacgccggaatcaaaaaccagcaccgtcgggcgaggtgtggcggtgctgttagaaggtatagcttccagtgaggtagtattctcttcctggagtagcgtagccataggccgtctcataatctttatcaaacaggttggcaattctaccacgaactgtcagatgagatgtgaccggatacgaaactgcgagatcccacagactcacgccgccaagtttaacgctttgttccggataggtactgtaatccttgtcataacgttgacccagatattgataagtcaccgcccagtcaaagtcatacagctgccagtccagctcatatttcacctgctgcttggcgcgccgcagcagcacttcattggtcttggcgttgcgaggatcgacatagtcataaccaatctgatgcgtcaatgggccggtatcaaacgaggccgtagcttcaatccctttgatggtcgccttacccacgttgtaatagacgtagttggtttcccccgtggaatcgatcaaattgtcgatgtcgttgcgataaccggagatgcgccaggtcaccgggccggtcagcccttcaaagccaccttcccactgcttgctttcttccggtttcagatcggtgttgttaccgaagttgccgtatagctggctcatattcggtgctttgaacgccgtgccatacgacgcgataaaacggtatccctcgacgaactcccaggccgcgctggtttgccaggtgccatgccagccaaactcggaatgatcgtcacctcgaaccgcgccttccagcgttaccgggccaaccagttgctgcgcggtcagataaatgcctgcatcacgttggcttttttcacccttcacggtggtggaatccggtttgattttctgttgctgccagtcgacgccagagcttacggtaccctgtccaacctgcagcgtattgccccactgcaggttgtactgttcggaatccaccaggctggccgagctgtcatgcatgccgaggcgaggatcgtaatcgtaatccttgctatggctgtagctgccaatcacttgtgttgcgtaaatgccttctttatagcgcaatccggtatcccaggtttggctatacagtttgcgcgtatccagcagagagctggtcggtgaggaataataactatcatacgccgtgcggttgtcgtaaccatacccgcgcacaaaaccgctgaccgattcgctgaactggtgctcaagcgcaccatacagcaacttactcataaagccatcgcgatcctgttggctttgcatgccggtgctgccgtaggccaccacgtcataccctttggtgtaggtgtagtcacccgccaccgtcgccacggtgctgtcgcccaactgctgttgagtcgacgcgtcataggattggtagccgttggagccgacgccggctgagagcgtagtaccgttcttttcgcgggtagtaataatgttgaccacgccgccgatggcgtcggaaccgtataccgccgagcgcgggccgcggatgtattcgactttctgcaccaacgaaatcgggatttggctaaggtcagaagagccgctgacgcccgcctgattaaggcgaatgccgtcaattagcaccagcacgtggctggagttggtgccgcgaataaacagcgagctcttttgccccaacccgccgttttggccaacgtccacgcccggcaaacggcgcatcacgtcggtcaggctcttggcctgccagcgatcgatatcgttacgggtgacgatggtggtcggcgccagcacggaagaaaccggctgcgggaagcggttggcggtcaccaccaggttatcgccattcgtggctgtggtgttgtcttgcgcccatccagaaaaagccgtgacggaggagaccaccgccagcagcgtattttttgtaattgtcatgagaaaagcatccaaacttaattggcggatgccgcaggatcatggccggtagttcgcgacggccacggatattgcgacgtaacaccggcaggtcttcgggcttgggatttgcgggccgcggggcgcgaccggcaacgggcgatgacttcccatcctgcagtggacagtgtctgcgtcaaaacgctatcgccgtgacttccccttaccgctgcgcgtcagctccggattcacaccggattcccttttcactcgctgcttgaggccggacggcaatgctacgatcaatgcaaatagatgtctagactgctactaatgttacaaataataaacgcgacaaaactggacttcacgggctgattccctacaatccccgctgatcaaatttgcctgacgagaagaaacacatgacgcccgagaatttgcctattgaacgttacgatgaccaactggcggagaaagtcgcccgcctgaagacgttgatgtcaccgttcgcggcgcccgagccggaagtgttccgctcgccagtcgaccactaccgcatgcgcgccgaattccgcatctggcacgacgcggaagacatgtatcacatcatgttcgatcagcagaccaagcagcgtattcgcgtcgatcaattcccggccgccagcgaactgatcaaccgcctgatgagcgccctgatcgccgcgctgaaaccggagccgatcctgcgccacaagctgttccagatcgattatctgtcgacgcaaagcggtaaaatcatcgcctcgctgctgtaccaccgcaagctggatgacgcttggcagcagcgcgccgagcaactgcgcgacgagctgcgggcgcagggttttgacctgcagctgatcggccgagcgtcgaagaccaagatcatgctcgaccaggattatgttgacgaagtgctgccggtcgccggccgcgatatgatctaccgccaggtggaaaacagctttactcaacccaacgcggccatgaacgtgcagatgctggaatgggcgctggcggtcaccgccggttccaaaggcgatttactggagctgtactgcggcaacggcaacttctcgctggcgttggcgcgcaatttcgagcgcgtgctggcgaccgagatcgccaagccgtcggtggcggcggcgcagtacaacatcgccgccaaccatatcgacaacgtgcagatcatccgcatggcggcggaagacttcacccaggcgatgaacggagtacgcgaattcaaccggttgaaaggcatcgatctgagcggctacaactgcgagacgattttcgtcgatccgccgcgcagcgggctggacgcggaaacggtgaagatggtgcaggcttacccgcgcattctgtatatttcatgcaatccggaaacgctgtgcgccaacctggaaacgctgcaggccacgcaccgggtcagccgcctggcgctgttcgaccagttcccgtatacccatcacatggaatgcggcgtgttgctggaaaaacaccgctgatacgacaggggcgccatgatggcgccccgtttcattacggctcttgagtcggcgcatccagcgccttgcgcgcctttagcttgaccccgatccacagcaccagcgccacacagatcaccgacggcaggaagttggagccgatctgcgggtattcggcgcgcacgatggcgctgtacatcaacagccccagcaggaagcaggccgccgccagcttcggcatgccgtccggcatggcgcggttcaggtaacgctgatgcagacagtacaccgccagcaccaacgcaatcagcgggaagatcgaaaacggcaccaccgagctgaacagcgcggcaaaggaaccgttgatcgaaaggccggcaatcaacgccagcagtaaggtgccattttcacggcctggtttttccatcattttttaccttttttatacgtgggacacagaagctttttcttgttcgcgacgataccagtaatacgcccctttggagatcatccgcagctgcagcaccagccgttcttccagctgctgccgctgctcgacgtcgatatccagcgcttccgcgccggcgctgaacacgatggtgaccatcgcttccgcctgcgcttcggtaaagctgcgcggcatgtggttttccaactcgaggtagtccgccagttcggcgatgaaatgctggatctcgcgcgccaccgccgcacgaaatgccgccgacgtgccggagcgctcgcgcagcagcaggcggaaggcgttcgggttgttgccgataaattccataaaggtggacaccgaggtgcggatcacgctgccgcccttggcgatgcgttggcgcgcctggcgcatcaactgacgcagcatcaggccgctttcgtccaccatggtcagccccagctcgtccacatcgcggaaatggcgataaaacgacgtgggcgcgatgcccgcctcgcgtgaaacttcccgcaggctcaggctggcgaagctgcgttcggcgctcagctggctgaatgcggcttcgatcagggaacgacgagtccgttctttttgttgtgctctgacgcccatatgcatatccggataggttccattctctcagtctaacgccctagactcggcaatatagcaaattttattgcaacagcatttatactaacgcgctctatcacacttccgccctgagccgattgtgctttgactcaaaaagcctaatggtgattgggtgagcagcgctatgatgttaagataccgttgtaatcttgtataaaaaaacaggtctctcctacatgcaacagcactatcaatttgatgccatagtgattggctcgggccctggtggtgaaggtgccgccatggggctggtgaaacagggcgcccgtgtggccgttatcgaacggtacaacaacgtaggcggcggatgtacccattggggcaccattccttccaaagccctccgccacgccgtcagccgcattatcgaattcaaccagaacccgctttacaacaattcgcgcacgcttagcgcgaccttccctgacattttacgccacgccgataacgtcatcagccagcagacccgcatgcgccaagggttctatgagcggaaccagtgcaagctgttcgccggcgacgcgcgcttcatcgacgccaacaccgtcagcgtcagctacatggacggcacccaggacaccatccgcgccgaccacatcgtgatcgcctgcggctcgcgcccttaccatccggccagcgtcgatttcaatcacccgcgcatctacgacagcgactccattctcgagctgagccatgaaccgcgccacgtgatcatttacggcgccggggtgatcggctgcgaatatgcgtccatcttccgcggcctgaacgtcaaggtggatctgatcaacacccgcgatcggctgctggcgttcctcgatcaggagatgtcggattcgctctcttaccacttctggaacaacggcgtggtgatccgccacaacgaagaattcgagaagatcgaaggcaccgaagacggcgtgatcgtgcacctgaagtccggcaagaaggtgaaagcggactgcctgctgtacgccaacggccgtaccggcaacaccgattcgttggggttggagaacgttggtctggagtcggacagccgcgggctgctgaaagtgaacagcatgtatcaaaccgcgctgtcgcacatttatgcggtcggtgacgtgatcggctatccgagcctggcttccgccgcctacgatcagggccgcatcgccgcgcaagcgatcgcctccggcgaagccagcggtcacttaatcgaagatatcccgaccggcatctacaccattccggaaatcagctccgtcggcaaaaccgagcaggaactgaccgcgatgaaggtgccgtatgaagtgggccgcgcccagttcaagcatctggcgcgcgcgcagatagccgggatgaacgtcggcagcctgaaaatcctgttccatcgcgacaccctgcagatccttgggatccactgcttcggcgagcgtgcggcggagatcatccacatcggccaggcgatcatggaacagaaaggtgaaggcaatactatcgagtatttcgttaatacgaccttcaactatccgaccatggccgaagcctaccgggtggcggcgcttaacggcttaaaccgcctgttttaacgcgctgtcgatgtagccctgcatgtgctcgcggatcgcttcggccaactgctcataacggctgcgcagtggggaaccggggcgatacaccaacgcgatggtgcgcttcggttccggcttgtagcaatccagatagcacacgccgtcgcgttcgcgctgcggcggcaccgccagtgacggcagcagggtaatgccgctgccggcagcgaccatattgcgcaacgtttccagactggtggcgcggaagtgagtatcttcgtccgcgcccgcctggaagcagaagcccatcgcctgatcgcgcaggcagtggccatcttccagcatcagcagcttctctcccgctaaatccggcatcgccacgcgctcacgctgcgcccacgggtgatcggaatacaccgccagcttcatcggttcatcgaacagaggcacttcgataaacgcctcggtttccttcaccaacgccagaatggcgcagtccagtttgccgctgtcgagttgcgccagcagttggtgggtttgcgcttcatgcaggtacatttccagtttcgggaaggttttgtgcagcgtcgggatgatctgcggcagcagataaggccccacggtcgggatcaggccgatgtgcagcggcccggacatggcttcgccctgctggctggccatctccttcaacactttcacttcgcgcagcacggtacgcgcctgctccaccagcaacagacccgcctgggtgaacagcaccttgcggctggtgcgctcgagcagcatgacgcccaactcgtcttccagcttgcggatctgcccgctcagcgtgggttggcttacatggcatgaatcggccgcgcggcggaagtgccggtgctcggccaaggcgaccagatactctaaatcacgaatattcattgtttccctccattccatgatagctcatggcgatagataagatagcaatgagcgattagatctatcaagccccagcgacaataatgtgtcccaacgaagcgatatcgcgctaaatgctaaaaattacttttcctaattaaggggttaatcaatgtttaccagtcaagaaggcaagaaagttcctcaggttactttccacacccgtcagggcgaccaatggattgatgtgaccactgatgacctgttcaaaaacaaaaccgtcattgttttctcgctgccgggcgcgttcacgccgacctgttcttcgagccacctgccgcgctacaacgaactgtccagcgtattcaagcagcacggcgtcgacagcattctgtgcgtctcggtgaacgacaccttcgtcatgaacgcctggaaagccgatcagcatgcggaaaacatcaccttcgtgccggacggcaacggtgaattcaccaaaggcatgaacatgctggtcgagaaagcggatctgggctttggccctcgctcttggcgctactcgatgctggtacgcaacggcgtggtcgagaaaatgtttgtcgagccgaacaagccgggcgacccgtttgaagtgtccgacgccgatactatgctgaaatacctggcgccggaattcaaagtgcaggaatcggtctccctgttcaccaaaccgggctgcccattctgcgccaaagccaagcagatgctgcaagagcgcggcattcagtatgaagagatcgtgctgggcaaagacgccaccaccgtcagcctgcgcgccgtcagcggccgcgctacggtgccgcaggtattcatcggcggccgtcacatcggcggcagcgacgatctggaaacattcctgtcagcttaataagtaataacaaagccaacgtgaactttggcgggctacggcccgccctttttttacctttcaggagcggatatgaaactgttgaacgttgatgtcgcggtcatcggcggcggcaccgcagggctcggcgcctaccgagcggccaaactgtctacccccagcgtggtgatgatcgaaggtgggccttatggcaccacctgtgcgcgcgttggctgcatgccatccaaattattgatcgccgccgccgaagcggtgcatcaaatcgaacgtgcgccgggctttggcgtgcacccaaccggcaaaacgcgtatcgacggacgcgaggtgatggcgcgcgtcaaacgcgaacgcgatcgtttcgtcggcttcgtgctggaaggcgtggacgagatcccggccgccgacaaaattcagggctatgcccgctttatcgacgacaacacgctgcaggtcgatgagcatacgcgcattgtggcgcagcgcatcgtgatcgccaccggctctcgccccagctggccggcgccgtggaatgaactgggcgatcgcctgatcgtcaacgacgatctgttcaactgggatgacttgccgcagtccgtggcggtattcggccccggcgtgatcgggctggagctggggcaagcgctgcaccgcctcggcgtcgacaccaaagtcttcggcatcggcggcgccgtcgggccgctcaccgacagcgccgtgcgcgattacgctgcgaaggcgctgggggaagagttctacctcgacgccgacgtgaaagtggagatgatgcagcgcgaaggcgaccgcgtatttatccgctatcaggatctgcagggccagtcgcaggagatcctggtggactacgtgctggccgccaccggccgccgccccaacgtcgatcggcttggcctcgagaacaccggcctgcagctcgacgctcgaggcgtgccgctggccgaccgcctgacgatgcaaaccagcgtgccgcatatctttatcgccggcgacgccagcaaccagctgccgctgttgcatgaggccagcgatcaggcgcgcatcgccggcgccaacgccggcagcttcccggagatcaatccgggtctgcgccgcagcgcgatttcggtggtgttctccgatccgcagatcgccatggtcggctcgaccttccgcgagctgagcgagaagttcagcgcctgcggctgttttgaagtgggcaaggtctcgtttgagaatcagggccgctctcgggtgatgctgcgcaacaagggcgttctgcacgtttacggcgaacagggcaccggccgtttcctcggtgcggaaatgatcggcccggacgccgaacacattgcgcacctgttggcctgggcgcaccagcagcagatgaccgtcgatcagatgctggacatgccgttctatcatccagtgatcgaagaaggcttgcgcaccgcgctgcgcgacctgcaggcgaagctcaaactcggcgcggccgaaatcgagcgctgccagcgctgcccgggcgaataacctcccattctccgttcatacccaccgggccttcaggcccggtttttttgcgcagcactttcacatttgcctccctcctcttgcctcacggccctcctgcgctcattttttatgctccgacattgaattgatatcaatatagatactaaaatgaaggaaggagccagaatggaagaagaacatggaaaagcatgaacactatacctatcgcatcacctggtcagcggaagatcgtgaatatgtcgggctgtgtgccgaattcccctctctgtcctggctggccgccacgcgtactggcgcactggagggcatcgaaagagtggtgagcgaaacgatcgccgatatgctggcgcaaggcgaaacgccgccgcaggcgctggcggaaaagaacttcagcggcaaactggtactgcgcatgacgccggaacagcatcgccggctggcgattggcgcgatggaggaaggcgtgagcctgaaccgttatctgtgcgcccgcctggcggggtagaggttcaagggcggcgccaggccgcccttgtcgtcgtcaagccaaacgctgtttcgctgcggcgattgccgcggcgacctgctgcggcgcaacgccgcctttggccgcacgtttgtccaggcaggattgcaacgccaggatcgggtagacatcgtcagcgatcgtcgcgctgaactgctgcaaatccgccagcggcagcgcttccagcggtttgccctggcgaatcgcttctaccactgcctcaccgacgatatggtgcgcttcgcggaacggcacgcccttggcgaccaggtagtccgccagctcggtggcgttggcatagccctgctccgccgcttcctggcagcgcgggcgcttcacctgaatgccgtccagcaccagcgccgccatctgcaggcagtccatccaggtgtcgagcgcgtcgaacaacccttctttgtcttcctgcatgtctttgttgtacgccagcggcaggcctttcagcgtcatcatcatgccggtcagcgcgccctgtacgcgaccgcacttaccgcggatcagctccagcgcgtccgggtttttcttctgcggcatcaacgaagagccggaggtcacgcggtcggacagctcgacaaacgccgcctcgccgctgttgaaaaagatcagatcttcggcgaagcgcgacaggtgcaccatgctgatggcggcgttggacagcagttccaacacgtgatcgcgatcggatacgctgtccaggctgttgcgggtcgccgaggcgaagcccagccagccggccagttgctcgcgatcgataggataagcagtgccggccagcgcgccgctgcccagcgggctgacgtccagccgtttcagggtgtcctgcagacggctttcatcgcgcgccagcatctcgacataggccaggcaccagtgcgcgaaagtcaccggctgcgcgcgttgcaggtgggtataccccggcatcaccgcatcctggttggcttcggcggtctccaccagcgcctgctgcagctggacgatcgcttgatgcagatcgccgatctgctgtttgcaccacagcttcagatcggtcgcgacctgatcgttgcggctgcggccggtgtgcagcttcttgcccaaatcgccgaccttctcgatcagcttctgctccacccagctgtggatgtcttcggcatcgctttgcacgatcgccaaaggatcggcctggacttccgtcagcaaggcattcagcgcctgctccagctgctgttgctccgttgccgtcaacacgttaacggtcaccagcgccttcgaccaggccaccgagcccacgatatcttgctccgccaggcgataatcgaaccgcagcgaatcgttgagttgcttgaaccgctgatccgccgcctgagtgaaccgtccgccccaaagtgccatacctttactcctgaatttttatgcgaaagggcgcagcatgctgcgcccttgcagagtcacgccaatcggttatttattctttttctcgttcaacgcgcggatgcgtgaagacagagagaacaggcggataaagccgcccgcgtggctgtgatcgtaaacttcgtcttcaccgaaggtggcgaactcttcggagtacaggctgttggcggattttttctggatcgccgtcacctggcctttgtacagctgcagcaccacttcgccgttcacctcttcagccaatgcttcggcagaggcctgcagcgagcggcgcagcggcgcgaaccaacggccgtcgtacaccacataggacatctccaggcccagctgctcgcgccatttgaagctgtcgcggtccagcaccagctgctcgacggcgcgcagcgccgccaccaggatggtgccccccggggtctcatagcagccgcgggatttgatgcccaccagacggttttccacgatgtcgatacggccgacgccgtgcttggcgcccagcgcgttcagggtttccaggcactggtacggcgacagcgctttaccgttaaccgccacaacgcggcctttctcaacggtgacggtcacctgctcaggctgatccggcgcttcctgcggatcgacggtccatacccagcaatccttgttcggcgcattccacgggctttccagcacgccgccttcggtggagatgtgccaggcgttctcatcgcggctgtagatcttctccagcgacgcggtagtcgggatgttgcgctctttcaggtaatccagcagcgcttcacgggaacgcaggttccactcacgccacggcgccaccactttcagctgcggcgccagcgcggtgtaggtggtttcgaaacgcacctgatcgttgcctttgccggttgcgccgtggcacagcgcgtccgcgcccactttcaacgccaactcgacctgcgccttggcaatgatcggccgcgccattgaggtgcccagcaggtagctgccttcgtacagggcgccggtctgcagcaccggataaacgtaatcgcggataaattcttcacgcagatcgaccacgtgacattcagaggcaccggactgcagggctttttgctccacgccttccagatcgctgcgctcctggccgatgtccgccacgaacgccaccacttcacagccgccgtagttctctttcagccatggaatgatggccgaggtatccaggccgccggagtacgccagaacgatttttttgatgccttggttttgcatgatctattcctttctaattctaaaattaagcgaggatccgggtgccaatcgacacgccgttaaacaaagcaggaagctgatcggcatggcgccagctggcgatatccaccgggcggccgagggtgcgggcggcgtcgagtgccgcattcaccttcaccaccataccatcggtgatgatgccttgcgcgatcagttgttccgctttttgcgccgtcatttccgcaatgcgttggcccttgccgtcgaggatgccgctgacgtccgacagcaggatcagatccgcccccagcgtcgccgccagcgccgtcgccgcctgatcggcgttcacgttcattaactgcccttcggcggtgatgccgatggagctgataaccggcaggtagccggcgcccagcagggtattaagcagcgcgggcgaaccgggctgcgcgttgccgacgtggcccaatgccggatcgagctgggtcacgactgcgctgccgccgtccgccaggctcaggccaacggcgttgatttggtgtttaatcgcccacgccagcagcgttttgttggcggtgccggccagcgcgccggtgatgatgtcgatctgatcggccggcgtgacgcgcaggccgttctttttcaccaccggtaaagcgagctgcttcatcagctcgtccaccacgcagccgccgccgtgcacgatcaccagcggacgctgatgctgctgccggtagctgtccaacgcggtaaacagacgctccagcgcttcttcactgtctaataacacgccacctaacttgataattaacgggttcattgctgtttactcacgctggtttaaaggagtgattgggtttccgggaagccgaaacggatattcaggcattgcaccgcctgcgccgccgcgcctttcagcaggttatcttccgccgccacggcgatcagatgctcgccctgcaccgcaaaaccgatgtcgcagaacggcagccccaccaccgctttcagcgccggcacgccctggtcgtacagccgcaccagcggcttgtcgtcataggcggcatgataggcggcggccacgtcctgcgcggtcaccccggctttcagacggcaggtgatggtttcaaggatgccgcgcgggaaattgcccaggtgcggcgtaaagatgaccggcacgccaaggtgcgcggcgatctccggctggtgccggtgagtgaaaataccgtacggctgcaggctcacttcgcagaaactggtggtcatgctggccttgcgcccggcgccgctgacgccgctggtggcgttgatcaccggccactggtcgaggttcagcagttgcttttcgatcaacggtttcagcgccagctgcgccgccgtcgggtagcagcccggcaccgcgatcagctgcgcctgtttgatcttgtcgctctgccactccgccaggccgtacaccgcctgctccagcagggcgccatgctgatgctcgaaaccgtagtactggctataaaaaccggcgtcctgcacgcgaaaggcgccggacagatcgaacaccacgcagcccgccgccaggaaagccggtgcgatatcgtggctgacttcatgggcggtggcgaggaacactacatcgatgccctgcgccgccttggcgacgtcggtcaacggctgcagcggcagatcgacgatgcctttcaactggggatggagatcggaaagcaactttcctgcatctgcactttgcgctgaaaccgctaaagcggttatgttcatgtgtgggtggcgattcaggtaagccgtgagctccgctccggcgtaaccgctggcaccaacgatcagcgtattcaacatgtggcctttcaccttctaaactgacgtgcggtcgcttgcgacccaggtaacagggctagccagcgttgttgcgccgttcacccacggagccaggcgttgatgcttttataaacatccgggcatcgggttcccttacgcttcggcttactgtatttttattcaaaataaatgcatgaatattgatactatcctaacctaaggctgtcaacagtgaagatgaaattacctccatttattgagctgtaccgggcgttgatcgccactccgtcaatcagcgccaccgatgccggcctcgatcagagcaatgaggcgttaatcaacttgctggccggatggtttgccgacctgggcttccgcgtcgacgtgcagccggtgccggagtcgcgccacaaattcaacctgctggccagcatcggcgaaggcagcggcggcctgctgctggccggccacaccgatacggtgccttacgacgaaggccgctggacgcgcgatcccttcaccctgaccgagcacgacaacaagctctacgggctgggcaccgccgacatgaaaggcttcttcgcctttattctggatgcggtgcgcgatatcgacgctagcaagctgaccaagccgctgtacattttagccaccgcagatgaagaaacgacgatggccggcgcgcgttatttcgccgcctccaccgccattcggccggatttcgccatcatcggcgagccgacctcgctgcagccggtgcgcgcgcacaagggccacatggccaatgccattcgcatcgtcggccagtccggccactccagcgatccggcgcgcggcgtcaacgccatcgatctgatgcacgagtccatcggccgcctgatggagctgcgcaagaccctgcaggagcgctacaacaacccggcgttcgccgtgccttatcccaccatgaacttcggccatatcagcggcggtgacgcggccaaccgcatctgcgcctgctgcgaactgcacctggatatccgcccgctgcccggcatgacgctcgacaacatcaacgaactgatgcatcaggcgctggagccggtaagccaacgctggccgggccgcctgaccatcgaagagctgcacgcgtcggtgccgggctacgagtgcccgaccgaccaccgcatggtggcggtgatcgaggagctgctgggcacccgcacgcaggtggtcaactactgcaccgaagcgccgttcgtgcaacaggtatgcccgaccctggtgctcggccccggctccatcgatcaggcccaccagccggacgagtacatcgacaccgcgtttatcgaaccgacgcgcaaactgttgggtcagctggtcaatcacttttgccggcaataaacccgacatttaacaggggaaatgctttatgcttcccctaactcaaaataagtagaaaacggcgaaataagccgtgctgataaccgacgcgccgtaattaaatttcagaaaatgcgccgattttgatgtttttttgctaaaaatagtgtcaattgacgattggacaggaacgcgatgtgatcaggcaggcggtctgcgcctgacgcgtgaaatttatttacaagataaaaatcatacagaactgggtcaggggttatatgaacgaacaatattcggcaatgcgcagtaatgtcagtatgctcggcaaattgctcggcgataccatcaaagaagcgctgggtgagcatattctcgatcgcgttgagaccatccgtaagctttccaaatcctcacgcgccggcaacgaagcgcatcgccaggagctgctctccaccctgcagaacctgtccaacgacgagctgctgccggtggcgcgcgccttcagccagttcctcaacctgaccaacgtcgccgagcagtaccacagcatttcgcccaacggcgaggccgccagcaacccggaagcgctggctcaactgttcagccgtctcaaagacaaaaagctcagcgacaaagagctgcagcacgcggtatcgcaactctccatcgagctggtgctgacggcgcacccgacggagatcacccgtcgcaccctgatccacaagctggtggaggtcaacacctgcctcagccagctcgatcacaacgatctggccgactacgagcgcaacaagatcatgcgccgcctgcgccagctggtggcccagtcgtggcacaccgatgaaattcgcaaacaccgcccttccccgatcgacgaagccaaatggggctttgcggtggtggaaaacagcctgtgggaaggcgtgccggcgttcctgcgcgaattcaacgaacagttggaaaactccatcgattacagcctgccggtggaagcggtgccggtgcgcttcacctcctggatgggcggcgaccgcgacggcaacccgaacgtgaccgccgaaattacccgccatgtgctgctgctcagccgctggaaagcctgcgacctgttcacccgcgacatccaggtgctggtctctgagctgtcgatgaccgaatgtaccccggagctgcgcgcccgcgccggcggcgatgaggtgcaggaaccgtaccgcgaaatcatgaagcagctgcgcagccagctgatgagttcccaggcttatctggaaggccgcctgaagggcgagcgcgtgctgaaaccgcacgacctgctggtgaacaacgagcagctgtgggagccgctgtatgcctgctaccagtcgctgcaggcctgcggcatgggcatcatcgccaatggtcaactgctggataccctgcgccgcgtgcgctgcttcggcgtgccgttggtgcgcatcgacgtgcgccaggaaagcacccgccataccgaagccatcgccgagctgacccgctatctggggctgggcgactatgaaagctggtcggaagccgataaacaggcgttcctgatccgcgaactgaactccaaacgcccgctggtgccgctgaagtggcaaccgagcgccgacacgcaggaagtgctggaaacctgccgggtgatcgccgaagcgccgcagggctcgatcgccgcctacgtgatttcgatggcgcgcacgccttccgacgtgctggcggtgcacctgctgctgaaagaggccggctgcccgttcgcgctgccggtcgccccgctgttcgaaaccctcgacgacctgaacaacgccgacgacgtaatgacccagttgctgaatatcgattggtatcgcggcttcatccagggcaaacagatggtgatgatcggctattccgactcggcgaaagacgccggcgtgatggccgcttcctgggcgcagtaccgcgcgcaggacgcgctgatcaaaacctgtgaaaaggccggcgtggcgctgacgctgttccacggccgcggcggctccatcggccgcggcggcgcaccggcgcatgcggcgctgctgtcgcagccgccgggcagcctgaagggcggcctgcgcgtcaccgaacagggtgagatgatccgcttcaagttcggcctgccggaagtcaccataagcagcctggcgctgtatgccggcgcgatcctcgaggccaacctgctgccgccgccggaaccgaagaaagaatggcgggcgttgatggacgacctgtccgacacctcctgccggatgtaccgcggctacgtgcgtgaaaacccggacttcgtgccttacttccgcgcggccacgccggagctggagctgggcaaactgccgctgggctcgcgcccggccaagcgcaagccgaacggcggcgtagagagcctgcgcgccattccgtggatcttcgcctggacgcagaaccgcctgatgctgccggcctggctcggcgccggcgccggattgcaggaagcggtgaaggccggcaaacaggcggagctggaggcgatgtgtcgcgattggccgttcttctccacccgcatcgccatgctggaaatggtgttcgccaaagccgacctgtggctggcggaatactacgatcagcgcctggtggataaatcgctgtggccgctgggccaacagctgcgcgatcagctggaaagcgacatcaaggtagtgctgaccatcgccaacgatgcgcacctgatggaagacctgccgtggatcgccgaatccatcgcgctgcgcaacgtctataccgacccgctgaacgtcttgcaggccgagctgctgcaccgttcgcgtcagcaggagcagccggacgcccgcgtggagcaggcgctgatggtcaccatcgccggcgtcgccgccgggatgcgcaacaccggctagtgagcctcatcgcggccccgtttatcggggccgttttttatgccttcccccacaaaaaaagggcgccgcggtaaagcgacgcccttttcaatggagcaagcccgtcaggcggcggccaccgggcgcacgcccagcgtgtggcagatggcgtagctcatctcggcgcggttcagggtatagaagtggaaatctttcaccccttcgcggctgaggatcttcaccatgtccatggcgatgttggcgccgaccattttgcgggtctccgcatcgtcgtccagcccttcgaacatgctggtcatccagctcggcacccgcacgttggtcatggtggcgaagcgctgcagctgcttgaagttggacaccggcaaaatgcccggcacgatttccacgtcgataccggcggcgacgcagcggtcgcgaaagcgcaggtagctctcaacgtcgaagaagaactgggtaatcgcgcgactggcgccggcatcgatcttgcgtttcaggttaatcaaatcggcctgggcgctcttcgcctccgggtgcacttccgggtaggcggcgacggaaatgtcgaagtcgcccacgtctttcagcagcgccaccagatcggtcgcgtacatgtccggcttgccgccgcccggcggcagatcgccgcgcagcgccacgatatggcggatgccgctgttccagtaatcggtcgcgatgtcgcgcagctgcgccgggctggcatcgatgcaggtcaggtgcggcgccgcctccaggccggtgcgttccttgatccctttgatgatgctgtgggtgcgatcgcgctcgccggagttggcgccgtaggtgacggaaacgaatttaggcttgaggatgctcagacgatcgatcgactgccacagggtctcttccatctcgctggtgcgtggcgggaagaactcgaatgatacgttaatctggccgttcaactccgccagactctgattcagcgcttcccgctggtttgcgtggaaaaaactcataccctgctcacctcttatcgatcactgtttttatttcatcttgatgagcgtctatacgtttagacgtctagatagaaaatgccgcatgttggctaaagagtcaacaggaaaatgaggggaataagatgattaatcctcacccgctcaacgagggaatttcatgatcgcgacaaagataagtatggcaggaaaagcaaaagggcgcggtgaacccgcgcccgcagaggattaaagcagctgcgccaatcggttaaggtctgactggatcgcgccggcggtgacgtcgcggccggcgcccggcccgcggatcaccagcggattatcgcgataccagcggctttcgatggcgaacacgttgtcgcacggcagcagcgaggccagaggatgctcagggcgcaccgcctccacgccgacccgcgccttgccgttggcgtcgaaacgcgccacgtggcgcagcaccaggcccatttcgctggcggcctcaaagcgctgctgcatctgctggttcagcgcctcaccgttctcgaagaactgatcgacagagcccagctcgcagcccgccggcaccagcgactcgacccgcacctggttcggttcgatgtcgtagcccgcttcgcgcgccaggatcaccagcttgcgcatcacgtcctggccggagagatcgacccgcggatccggttcggtcagcccctgctgccaggcctgatccaccagctcggtgaacggcaccgtgccgtcatactgcaggaacagccaggagagcgtgccggagaagatgccgctgatcgccagaatgctgtcgccgctgtcgcgcagatcgcgcaccgtgtggttgaccggcaggccggcgccgacggtggcgttatacagccagtggcggccggttttggcgaaggcgtcgcgaatttggcgatagctgtcgctgcacgaggcccccgccaacttgttggcgctgatcacgtggaaaccgtagctggcgaaatccagatactgcccggccagctcttcgctggcggtcacgtcaagcaccaccagatcgtcgaacgggtgcgcgcgcatccacaggaacagcgattcttcatccagctcctgcgcttcgtcctcaaagaatgccagcgcgcggctggcgtccagcccgtcatagttcagcaggctgcggcggctgtccaccacccccgccaggataaattcgaagccgctgcgcgcggagatattggtctgctcacgggcgaacagctccagccagcgcgagccgatattgcccttgccgaacagcaccagaccgatgcgcttctcggcgcggaacaggctttggtgcagcccctggatcagcagcgcggtcggcccctggcgcaataccgccaccaggctgatgccatcttccgcctgccagatgaactcgaccggctgatctttcaactgctgatagaaacggtggctgtgcagcgggttcttgcacaccccggcgccgaccatcgccaccagcgccaacccttcacgcaggcgcagctcgcctggcagcgccgcggcctgcagcgtcgccagcgcgctgttgaccacctcggaggtgtaacacagctgcaccaggttgcggtcagggtggatgcccaccgccagcggttttatctgcgcgcgcttgagcaccagatccaactctttctgcgccagtttgaagtcatgttgagcggcgacgtgcagttcaatcaggcacacatcgtcgtggctggtgacaatcttggcgccggtgccggaagccaatacgcgctcgatgcgcgtcgagccctgctccggctgatagctgcagcgcagctgaagatcgatatcgctgccggagaccggctgcagggtacgggtgtgcaataccggcgccgccaggcgcgccagctcgctggcttcgtccagacgcagcagcggcagcaagcaggcgtctttcaccttgcgcggatcggcgctgtataccccggccacgtcgctccagatggtgacgcgcgcagcgccggccaacgcgccgacctgagtggcggagtagtcgctgccgttacgccccaacaacacggtttccccagcgtcgttgcgcgaaatgaagccggtcaccaccaggcgtttgcccggatgttgagccatcaattgctgcagcagcgggtaagaacggccttcatccacctgcggctgcgcggcgcgctcggcgcgcaggaaatcacgcgcgtccagccaggccgcctgcatatccagctgattaagcaccgccgccatcaggcgcgccgaccagatctcgccgtgcccgaccacttcggcatagcatacctcgtcgacgttgccgtccagcagccccgccagacgttccagatcctgaatgaactcggcgatcagcggctcggcgctttccggcggcaacaggccgctgataagatcgctgtgatagcgacgcaacgtctgctgcacctgatgcgcagacaggcgatcgctctggctgagcttcagccagttgatcaactggttggtggtactgccggcggccgataccaccatcatgtcgcccggctggctgtattccgccataatcccggccacacgcagataacacttcacatccgccagactgctgccgccaaacttgtgcagttgacgcccgctcaccggccctgctacagcaattgcattcatgcttacctcgttgccgccgcctggaaagcgcgttccagatcggcaatcaaatcttcactgtcttcaatacccacggaaatgcgcagcaggctctcggagatgccggccgctgcccgcgcctccgccgccatgccggcgtgagtcatggtcgctgcatgcgagatcaggctttctacgccgcccaacgattctgccagagtaaacagctcaagggcagagagaaaacggcgcagcaccgcttcatcgccgtccagttcaaaactcagcatcgcgccgaaaccgcgctgctgacgacgggcgatctcatgccccggattctccggcagggagggatgatacagctttttcaccagcggttgctgctgtaaatagtcaacaatcgcttcagcgttttgttgcgccgccttgatgcgcggcgacagcgtgcgcatgccgcgcagcaacagataactgtcgaacgcgccgccggtcacgccaatgttgttcgcccaccaggccagctcgaccgccagctcgggatctttggcaatcaccgccccggccaccacgtccgaatgcccgttcaggtatttggtgcaagaatggaccaccagatcggcaccgagttcgatcggctgttgcagggccgggctgaggaaggtgttgtccaccaccgtcaacgcgcccgccgcatgcgcggcagcgcagatcgccgcgatgtccaccacccgcagcagcggattgctggggctttctatcagcaccagcttcggcttttgcgccagcgcctgctgcagggcttcttcattaccctgatcgacgaacagcacgcgataggcgccgcgcttgctcaggctgtcgaacagccgatagctgccgccgtagcagtcgtgcggcgccaccagcagatcgccgggcttcaacaacacggtggtcaccagatggatcgccgacatcccgctgccggtcatcaccgcgccggcgccgccttccagctccgccaacgcgcgctgcactacgtcgcgcgtcgggttgccgcgtcgcgagtagtcatgggctcggggttggttgaagtcggtaaagttataggtgctggacaaatgaatcggcgggacaacgcagccgtactgttcgtcgtcgttcaggccgctgcgtacggcaatcgtggctggtttacgcgtcatgggctcgctcggctctcggttcggtggatgaggcctaaagagtaatcgcaggattgatagacgtcaatacatctggacatctaaacttctttgcgtatagattgagcaatgacacaatacccgctaaaattatgccgatatgacatgacgataagatgttaagcggcaatgcctggccgaagcggggcattcagtgaccctggtcgcgtaaaattgacatttatttagtgagaacagtgaagatcgggcataattggccggtttttagaattttgtaatttttctgacaaagttaaggtgtcccatggctgagtggaacggcgagtatgtcagcccttacgctgaacacggtaaaaaaagcgagcaagtcaaaaagatcacggtatccattccgctgaaggtcctgaaaatccttaccgacgaacggacccgtcgccaggtgaacaacctgcgccacgccaccaacagcgaactgctgtgcgaagcgtttctgcatgcctttaccggccagccgctgccgaacgatgaagacctgcgcaaagagcgcagcgatgaaatcccggaagccgcaaaagcgttgatgcgcgaactgggtgtcgatcccgatacctgggaatattaagaacagcccggcgaacgccggcggcagaaaagaaaaaaggcgcccagggcgcctttttcatcggtcgataagaaatcttatttcttagcgcctggtacgctgaaacgcttgttgaagcggtcaacgcggccaccggtagcaacgtcacgctgcttgccagtgtagaacgggtggcatgcgccacaaacgtccaggttcagatcgtggcccacggtggagcggatcttcatcacgttaccgcaagagcagttagcagtaacttcttcgtattttgggtggataccttgtttcatgggaaacctcagttaaggccgtgtcgctatccagccctgtttcgccagacaccacacgtggttgataatagaattttggtatcgaattataccaaaggcggcaaattatacagcattagccggggcgcgcaatcggaaccgtacatttgccgatgcgccgtgtaaactgatgcccactttttttcaatttggatgagatcatgcccgtcgtacacgttgctttgccggtccccctcgcccgcaccttcgactatctgctgccgcccggcatgcagccggtggccggcgcgcgcgtgggcgtgccctggggcaggcagcatgcaatcggcatcgtcaccggctgcagcgacaccagcgaactgccgctggacaagctcaaaccgatcgacagcgtgatcgacaccgagtcgctgttctctcccagcctgtggcgcatcctgcgctgggccagcgattactatcactatcccatcggtgaagtgctgttccatgcgctgccgatcctgctgcgccaaggcaaaccggccgaggccgcgccgctgtggcagtggttcgccaccgaagaggggcgcgccacgccgcccgaaagcctgaaacgcgcgccgaaacagcagcaggcgctggcggcgctgttgcaacgcccggtctatcgccatcaagtcagccagcttgagctgacggaaagcgctctacaggcgctgcgcgccaaagggctgatcgacctgcgtgctcaggtcgcggccacgcaggactggcgccccaatttcgcggtgcttggcgagcggctgcggctgaataccgaacaggccaccgccgtcggggcgatcagaagcgaggatgagcagttcgccgcctggctgctggccggggtcaccggctccggcaagaccgaggtgtatctcagcgtgctggagaacgtgttggccaaaggccggcaggcgctggtgctggtgccggaaatcggcctgacgccacaaaccatcgcccgctttcgcgagcgcttcaacgcgccggtggacgtgctgcactccggactgaacgacagcgaacggctggcggtttggctgcgcgcgcgcagcggcgaagccgcgatcgtcatcggcacccgctcggcgctgttcacgccgttccggcaactgggcgtaatcatcatcgacgaagagcacgacagctcttataaacagcaggaaggctggcgctaccatgcccgcgatctggcggtgtttcgcgcccgggaagaggacatcccgatggtgatgggctccgccacgccggcactggaaacgctgcacaacgtgcagctgggcaaatatcgccagttgaagctcacccaacgcgcgggcaacgccaaaccggcggcgcagcacctgatcgatctgaaaggtttgccgctgaaggtcggcctgtcgcagccgctgttgaagagcatgcagcaccatttaaaagccggcaatcaggtgatgctgttccttaaccgccgcggctatgccccggcgctgttgtgccacgaatgcggctggatcgccgagtgccagcgctgcgatcactattacaccttccaccagcatcagcgccagctgcgctgccaccactgcgacagccagcggccggtgccgcaccaatgcccgcagtgcggctccacccacctggtatcggtcggcgtcggcaccgagcagctggagcaggagctggcgccgctgttccccgacacgccgatcacccgcatcgatcgcgacaccaccagccgtaaaggggcgctggagcagcacctggcggatattcatcgcggcgaagcgcgcattctgatcggcacgcagatgctggccaagggccaccattttcccgacgtcacgctggtggcgttgctggacgtggacggcgcgttgttctccgccgacttccgctccgccgagcgtttcgctcagctctatacccaggtctccgggcgcgcgggccgagcgggcaaacagggtgaagtgctgctgcaaacccaccacccggagcacccgttattgcaggtgctgctgcaacaaggttacgacgccttcgccaaacagacgctggcggagcgcaacagcgtgtttctgccgccctacaccagccacatcatcgtgcgcgccgaagatcacgataaccaacaggccccgctgttcctgcagcagctgcgcaacctgctggaagccagcccgctgaaggacgattcgctgtgggtgatgggcccggtgccggcgctgcaatccaaacgcggcggccgtttccgctggcagctgctgctgcagcacccgacgcggcgcgtcctgcaacagctgatgaaaagctcgctgccgctgatcggcaccctgccgcaaacgcgcaaggtgaaatggacgctggatgtcgatccgatcgacagctgatcccggaaaagtccgatttagctgccgcagtgcaaacgtttacccttgaaattgcgagcgaacgctaaaaaaccttctcaggtcacattttttatgcaaattaggtaacaaaggcggggcgtattctgtttagaatgtctgcgagggcaaattttgtcgccacatcgcagcgcgacggagtgcccgaacgcgagtggcgctcaatgacaacaatctcgccaccgcatgccggacattgtgagcaaacagcagtagtggcgtcggcatggggctgacgcaaggagaaaggcgttggaacacaagaaagagttatccatggcgaccatgaaagacgtcgccgaaatggcgggcgtttcaacggctaccgtatcgcgtgcgctgatgaacccggaaaaggtgtcaacgccaacgcgccagaaagtggaacaggccgtgctggccgtgggttattctcctcatgctctgtcacgcaatatcaaacgcaacgaatcccgcaccatcctggtgatcgtgcccgacatctgcgatccgtttttcgccgatgtgatccaggggatcgaacagaccgcggcccaacaaggttatctggtgctgatcggcgactgcgcgcagcagaaccagcaagagcgcaccttcgtcaatctgatcatcaccaaacagatcgacggtatgctgctgctgggctccaacctgccgtttgacgccagcaaggaagagcagcgcaacctgccgccgatggtgatggccaacgagtttgcccctgagctggaactgccgacggtgcacatcgataacctgaccgccgcctttgaagccgtgcattatttgcatcaattgggccaccggcagatcgcctgcgtcgccgggccggaacagatgccgctgagccattatcggctgcagggttacgttcaagcgctacgtcgtaatggcattaccgtcgaaagcagctatattacccggggtgattttacctacgaagccggcgcgcaagcgctgacggcgctgatggctcagccgaaaccgccgacggcggtgttctgccacagcgacgtcatggcgatcggcgtgctgtcccaggcgaagaaaatggggctgcgggttccgcaggatctgtcgatcgtcggctttgacgacctcaagctggcgcagtattgcgatccgccgctgaccacggtggcgcagccgcgcttccagatcggccagcaggcgatgttgctgctgctggagcagttgaacggccagacggtggccagcggctcccggctattggacagtgaattgattatcagaggcagcaccgctgccccgaaacgctagtcaaatattttagggttcagtaacatgacggacttatcctctcatcaggacacagcggaataatagtggcacaaaaagactatgtaagccgtgggcgcgcagcaggagctaagcgcaaaacccccagccgtaaaaaacgcagttctccgaaggtttccaaaaccgtgctggcgttagccgtcgcgttgctggttgtctttgtcggtggcctctatttcattacgcacaacaagccggaagacgcgccgttgttgcctgcgcacaccactcgcccgggcaacggcctgccgccgaagccggaagagcgctggcgctatatcaaagagctggaaaaccgccagatcggcgtgcaaactccgaccgaaccgacggccggcggcgagctcaattccaaaactcagctgaccgccgaacagcggcagttgctggaacaaatgcaggccgacatgcagcagcgcccgacgcagctgaacgaagtgccgtataacgatccgggccaggccaacgcgcgcagtaaccgccagcagcagcagatgcaacaacagcaaatgcagcagcagccggtacagcaacagcagcaggtcactcagccgccgcgcaacccgttcaacaacggggccaccaccgcgccggtgcagcagcaccagcagccgaagccggccacccagcaaccagtgcaggtgaaacagcctgagccgaagccgcaaccgaagccggagcccaaaccggaagtgaaacaggaaacggccaagcaggacaccaaaccggaatcgaaacagaagtggatggtgcaatgcggttcgttccgcgccaccgatcaggctgaatccgtgcgtgcgcgcctggcgttcgagggcatcgagagccgcatcaccgccggcggcggctggaatcgcgtagtgctcggcccctacagcagccgcgccgcagcggacaaaaccctttcgcgcctgaagggcgtcggcatgtcgagttgcattcccctctccgttgggggttgaaaagcgtcaatccccccccatctatactctcaatatgcctcgtagcgtctgcgaaagcaggcgctgcggggacttctttccgtctttaacgagggtctgctcgtgacaacaattgtaagcgtacgccgcaacggccaggtcgtcatcggtggtgatggccaggcaaccctgggtaatacggtgatgaagggtaacgtcaagaaagtgcgtcgcctgtataacgacaaagtgatcgccggtttcgccggtggcaccgctgacgccttcacgctgtttgaactgtttgaacgcaaactggaaatgcatcagggccacctggtgaaagccgccgtcgagctggcgaaagactggcgcaccgaccgcatgctgcgcaagctcgaagcgctgctggcggtcgccgatgaaaccgcctcgctgatcatcaccggcaacggcgatgtggtgcagccggaaaacgatctgatcgccatcggctccggcggcccgtacgcccaggccgccgcccgcgccatgttggaaaataccgaactgagcgcccgcgacatcgttgagaaatctctcaacatcgccggcgacatctgtatttacaccaaccatttccacaccattgaagaattgccttccaaagcgtaaggatcgaataccatgtctgaaatgaccccgcgcgagatcgtcagcgaactggacagctatatcattggccaaaacaaggccaaacgcgctgtcgccattgccctgcgcaaccgctggcgccggatgcagctcaacgagatgctgcgtcacgaagtgaccccgaaaaacattctgatgatcggcccgaccggcgtcggtaaaaccgaaatcgcccgccgtctggcgaagctggccaacgcgccgttcatcaaggttgaagccaccaagttcaccgaagtgggctatgtgggcaaagaagtggactccatcatccgcgatctgaccgatgccgccatcaaaatggtgcgcatgcagtcgatcgagaaaaaccgcacccgcgccgaagagttggccgaagagcgcattctcgacgtgctgatcccgccggccaaaaacaactggggccagccggaagaaaatcaggaaccgtccgccgcccgccaggcattccgcaagaaactgcgcgaaggccagctggatgacaaagagatcgaaatcgatctggccgccgcgccgatgggcgtggaaatcatggcgcctcctggcatggaagagatgaccaaccagctgcagtcgatgttccagaacctcggcggccagaagcaaaaaccgcgcaagctgaagatcaaagaagccttcaagctgctggtggaagaagaagccgccaagctggtgaatccggaagagctgaaagagcaggcgatcgaagcggttgagcagcacggcatcgtgtttatcgatgagatcgacaaaatctgtaagcgcggcggccaaagctccggcccggatgtctcgcgcgaaggggtgcagcgcgatctgctgccgctggtggaaggctgcaccgtgtccaccaagcacggcatggtgaagaccgaccacatcctgttcatcgcttccggcgcgttccagaccgccaatccgtcggatctgatcccggaactgcagggccgtctgccgatccgcgttgagctgcaggcgctgaccaccgaagacttcgagcgcatcctgaccgagccgagcgcgtcgctgaccgagcagtacaaagcgctgatgggcaccgaaggcgtcaacatcgagttcaccgccgacggcatccgccgcatcgccgaagccgcgtggcaggtcaacgaaagcaccgagaacatcggcgcgcgtcgtctgcacaccgtgctggagcgtctgatggaagatatttcctacgatgcgagtgaaattaatggccaatccattacaattgatgcggattacgtgcgcagtcatctggatgaactggtggcggatgaagatttgagtcgttttatcctataatcgctcaatcattgtcttgtcagtcatctgtgtgggaggcattgcctcccacaattatttctaacggacacagaagcgaaacatgagctcatcaacctccaccaccccgatttccgcctggctggaaagtctacgcccccgcaccctgccgctggcctttgcctccatcgtggtcggctcggcaatcgccgcctggcacggcagcctgaaaccggaagtagcgctcctggcgctgttgaccgccggcctgctgcagatcctctccaacctggcgaacgactacggcgatgcggtcaaaggcagcgacaaagaagatcgcatcgggccattgcgcggcatgcagaaaggcatgatcacccaggcgcagatgaaacgggcgctggtggtgacggtggtgctgatcgccctcgccggctgttcgctgatcgccgtcgcctgtgagcaacccagcgacgtggtgggtttcctggtgctgggcgggctgtccatcgtggcggccatcacctacaccgtcggcaacaagccctacggatatttggggctgggcgatatctcggtgctggtgttcttcggctggctgagcgtggccggcacctactatctgcagacgcacaccttcgacagcgtcgtgatgctgccggccaccgcctgcggcctgctggcgacggcggtgctcaacatcaacaatctgcgcgatatcgaaagcgatcgcgaaaacggcaagaatacgctggcagtgcgtctcggcccgcacaaggcgcgcatttaccacgccctgctgctcggcggcgcggtgctgtgtttcgcgctgttcacgctgttcaacctccacagcccgtggggttggctgttcgtgctggcgatcccgctgctggtgcgccacggcctgcgcgtgctgcgcgatccgacgccggtcggcatgcggccgatgctggagcatatggtcaaggcggcgttgctggccaacctgctgttcgccatcggcgtggcgctcagttaaaaactgatgattttgccaacagggcgaataaagggatatactgaacattcctgcggcaaacagacgtaaaatcctatgaaatacgatacttccgaactttgcgacatctatcatgaagaggtgaacgttgttgaacctctgttctccaattttggcgggcgtacttcatttggcgggcagatcaccacggtgaaatgctttgaggataacggcctgttattcgatctgcttgaagaaaacggccgcggccgcgtgctgttggtcgacggcggcggttcggtacgccgggcgctgatcaacgccgaactggcgcgcctggccgcccagaacgaatgggaaggcatcgtggtgtacggcgcggtgcgccaggtggacgatctggaagagctcgacatcggcattcaggcgatggcggcgatcccggcgggtgccgtaagcgaaggcgtgggcgaaagcgatatccgcgtcaacttcggtggcgtcaccttcttctcaggcgaccacctgtatgccgacaacaccggcatcatcctctccgaagacccgctcgacatcgagtgattttcggacatgaaaaagggcgcctcaggcgcccttttcgttgctgcatggcgtaaggaatcaaacctcttccattttgcccagcagcgcgcgcaggcgatcttgccatacgtgctgttcttctttcagctgttggttttcacgcaccagcgcttcgtggttgccggaggcagcctgaacttcctgcgacagagagttgtttttgtctttcagctcttcaatttccatctgcaacaaggtgatggtatcaatcgcctgctgtacttttgcttccagtttctcaaatacttcaaatgacatgcttcagtcccctcatgatagcaaggcgtacatctataagtagcggccgcaacgtcggctgcagctactgcgaatattgcatcgcgctcagtgacgcgcgccgttacgaaaggcgcgccggtctcgattcgttaaaaacgattgtaagtagccagtctccgcctgtctagcaacataccggatcatcgcgcagtctgttgcaattttcctgccctcgccatcagcaaaaactgaaaatccccatcgccgccgccgcgagttgttaacgcccctcgctaaaccactggtcagatcacacttttatggctcagaaagaacactaaacgacgcgaaatcgctcaattttatgacgcgccacacacattttgatttcgctatttctcgtttatgttcgttaacgataaatttacatcacgtcctcattcaataattggacgagatgaaaaaactgtgcccataggtcagatgtatacctggctgagcctataaaccaacaaccgccgttttgcaggacaccaacattatgagccaaaccaccagtccgacattaaaaggccagtgcatcgccgagttcctcggcacggcgctgctgatcttctttggcgtaggctgcgttgccgcgctgaaactggcgggcgccagcttcggccagtgggaaatcagcatcatttggggcctgggcgtcgccatggccatctatctgaccgccgcgatttccggtgcgcatctcaacccggcggtcaccctcgccctgtggctgttcgcctgcttcgacgggcgcaaagtggtgccttacatcattgcgcaggtcgccggcgccttctgcgccgcggccttggtctacgggctgtactacaatctgttcttcgacttcgaagcggcccaccacatggtgcgcggcagcaacgaaagcctcgaactggccggcatcttctcgacttaccctaacgcgcacatctccgtcggccaggccttcctggtagaaatggtgatcgctgcaatcctgatgtgcctgatcctggcgctgaccgacgacggcaacggcattccgcgcggcccgctggcgccgctgctgatcggtattctgattgccgtgatcggcgcctccatgggaccattgaccggctttgcgttgaacccggcgcgtgacttcgggccgaaactgttcgcctacctggccggctggggcaaagtcgccttcaccggcgcacgcgacatcccgtacttcctggtgccgatcttcgcccctatcgtcggctgtggcctgggcgctttcggttaccgcgcgctgattggccgccacctgccgtgcgacgtctgcgtgacggaagaagagcctgacgccaagacccagcagcgtaaagcgtgatgggtgcagttttacacggttaacaacagcaggataattaccatgactgtagaaaaaaaatacattgtcgcactcgaccaagggaccaccagctcacgtgccgtcgtgctcgatcacgacgccaacatcgttgcagtatcgcagcgcgaattcccgcagatctatccaaaggccggctgggttgagcacgacccaatggagatctgggcgtcgcaaagttcgacgctggtagaagtgctggcgaaagccgacatcaattccgatcagatcgccggcatcggcatcaccaaccagcgcgaaaccaccatcgtctgggaaaaagagaccggcaagccgatttacaacgccatcgtttggcagtgccgccgcaccgccgacatctgcgagaagctcaagcgcgacggcctggaagagtacatccgtcacaacaccggcctggtggttgacccgtacttctccggcaccaaggtgaagtggatcctggacaacgtcgaaggcgcccgcgagcgcgccaagcgcggcgaactgctgttcggcaccgtggatacctggctggtgtggaaaatgacccaggggcgcgtacacgtcaccgattacaccaacgcctcacgcaccatgatgttcaacatccacgaactggactgggacgagcgcatgctggaagtgctggatatcccgcgcgccatgctgccgaaagtccgcccgtcctccgaagtgtacggccagaccaacatcggcggtaagggcggcacgcgtattcctatcgccggtatcgccggtgaccagcaggcggcattgtacggccagctgtgcgttcaaccgggcatggcgaagaacacctacggcaccggctgcttcctgctgatgaacaccggcaaagaagcggtgcgttcgaaaaacggtctgctgaccaccatcgcctgcggcccacgcggcgaagtgaactatgcgctggaaggcgcggtgttcatcggcggtgcgtctatccagtggctgcgcgacgagctgaaactgatcagcgacgccgccgactccgaatatttcgccaccaaggtgaaagacagcaacggcgtctatgtggtgccggccttcaccggcctgggcgcgccctactgggatccgtatgctcgcggcgccatcttcggcctgacccgtggtgccaacagcaaccacatcatccgcgccacgctggaatccatcgccttccagacccgtgacgtgctggacgccatgcaggccgacgccaacacccgcctgcaatcgctgcgcgtggacggcggcgcggtcgccaacaacttcctgatgcagttccagtccgatattctcggcacccgcgtagaacgccctgaagtgcgtgaatcgacggcgctgggcgcggcgttcctggcgggcctggccatcggctactggaacgatctggatgaagtgaagagcaaagcggtggttgagcgtgaattccgcccaagcatcgaaaccaccgaacgcaactaccgctacagcggctggaaaaaagcggtggctcgcgctcaggcatgggaagatcacgagtaatcccgaagctgccgtttcgccaacaagcgctgcctgcgggcggcgctttttttttgccccgccctgccgccaccgcgctgtgatagactttgtcgatattttcctccctttctcacagacaggtttgccatgaaacgtgaattagccatcgaattctcccgcgttaccgaagccgccgcgctggcgggctacaaatggctggggcgcggcgacaagaacgccgccgacggcgcggcggtccacgccatgcgcatcatgctcaacaaagtggatatcgatgggcgcatcgtgatcggcgaaggcgagatcgacgaagcaccgatgttgtatatcggcgagcaggtcggtaccggtcagggcgacgcagtcgacatcgcggtcgatccgatcgaaggcacccgcatgaccgccatgggccagtccaatgcgctggcggtattggcggtgggcgatcgcggcaccttcctgcacgcgccggacatgtacatggagaagctggtggtcggcccggcggcgcgcggcgccatcgatctcaaccggccattggcagaaaacctgcagaacgtcgccgaacgactgggcaaaccactgtcgcagctgacggtgatcgtattggccaaaccgcgccacgacggcgtcatcgcgcagatgcagcaattgggcatgcgagtattcgccattcctgacggcgacgtagcggcctccattctcacctgcatgccggaaagcgaggtcgatgtgatgtacggcatcggcggcgcaccggaaggggtgatctcagccgcggtgatccgcgcgctggacggtgacatgcaggcgcgtttgctgccgcgtcatgaggtgaaaggcgacagcgccgaaaaccgccgcatcggcgaacaagagttggcccgctgccgggagatgggtatcgaagccggccaggcgctgcgtctggatcagatggcgcgcaacgacaacgtgatcttctccgccaccggcatcaccaagggcgatctgctggaaggcatcagccgccagggcaacatggccaccaccgaaacgttgctgatccgcggcaagtcgcgcaccatccgccgtattcgttcgacccactatctggatcgcaaagacccggcgctgcacgagtttctgctgtaacgaaacagggcgccgaatggcgccctgatgattgatgacaaacctcatgcccttgccgtgttggcagagaacagcgaataaaaaacaaggaaaatcaatctattgattttcggctgataaccacaaaggggagaaaaaccccgctttttctcccctttgtcaacggtatgagggcgccgaatggcgccctgtcgttatgcggtatgcccctgatgctgcatacgattggacagcggccaccagcacagcaggatcagcagcgccatcgcgaacatcagcaagccgaggctgaactgcccggtttgcggcaacatggcggacagccaggtcgccagaccggaccccatgttctgcatcccgcccaccagtgcgcccgccgcgccggccaggtaagggaacggctccatcgccccggtggtcgccagcgggaacagcatgccggcgccgaagaagaacagcgcggccggcacgatcagcgtccagatgttcatcacgccgaaccagcccgggatccacatcatcgcccccgccagcaggcagctaatcaccgaatgccacatcagcgtgtggaaggtcttgccgtcgcgcccggcgtaccaggcgccgaaaaacgccgccgggatcggcagaatgaacaggatgctgacggtcagcccactcagccccaacacgccgcccatcaacacgccgcagctggcctcgaataccgcaatccccgccagcgcgccgatcagcatcaccagatagcagctgaaggtgctgtcacccagcagctggcggaaactggccagcatgcgacgtttttccgtttgcaccgggcgggtttccggcagccagcggaacatggcgaaggcgacgcaggcgcacagcgccagcaggaaggcgtagcaggcgcgccagccgaacaccatcgccaatgcgccgccgatcaccggcgccagcagcgggctaaccaaaatccccatgttcaacaggctgttggcgtagcgcagggcggtgccggcatacagatcgcgcggcatggtgcgcgccatcacgcccgccacgccggtgcccatgccctgaatcgcgctggcggcaaccagcatcgtcaggttggtggacagcagcgcgcccagcgcaccgaccaggaagatcatcatgccggtcaggatcaccgggcggcgcccgatacgatccgatatcggcccgtaaatcagctgggagaaaccgtaggtcagcagatacgccgccatcacccgttgcacggcgccggtgcgaaccgacagatcgtgggcgatatcagcaataacgggaacataaatggtttgcgccatctggccgacggcgaccaacaggataagcatcaccagcaggtgaaaattctctagttttctcattatcttcgttaacgtttcaactcgtcacagcgtcccggtatggccgttgcagcagccagaacggcgagcagccctctatggcggcataaactaatcaaatctgatttttttagcgagtttcaggcagatattgatccaggtcacactggcagcaaacccgaccaggctcgtaaattaaactgtacgtctaacgctttggagttaaaaatagcgcccttgcagtagccgcgctttagcatttaatcgataattattttcatcaacttgaaataaaataacaccatagggatttggttcatgaaaacacctgagctgattttattgcagttaaaggctctcggcccgcactcggccaaaatgctggcggagcgtctggacatcacgccgatgggcatccgacaacatctgcaatccctggaaaaacgtgagttggtttgttacgaagaagcgcgcagcaaggtcggccgcccgacgcgctactggtcgctgacagcgcgagggcacgcttttgcggccgccgatcaggaacggctgcgggcatccgcgctgcggctgtttggcggcgccggcgtggaaccgttgctgaacgcgcgcgaagagcagctttatctgcgttatgccgaagagctgtctgccgagcgcagccaccaagagcggttagcccgattggtgcgtctgcggcaacatgatggttacatggctgaattgctcgatcatccgcacggtgcgctgttggtggaaaaccactgtccgatcggcgtggccggttccaactgcagcagcctgtgcaattccgagctgcagctgtttcaccgcctgttcggcaacgactatcggatagagcgcaccacgcacgccatttccggctcacgacattgtgcttatttgattcgaccacgggagctttagagtatggctgaatgggtaaacggcaaggttacgcaggtaaaacaatggaccgacgggctgttcagcctggtggtcaatgcccccatcgatcctttcaccgccgggcaattcgccaaactggcgctggagatcgacggcgaacgagtgcaacgcgcctactcctacgtcaatgcccccgatgacgccaacctggagttctatctggtgacggtgccggaaggcaaactgagcccgcgcctcaatcagctgcggccaggttcggatgtcatggtgactaaagaagcggccggattcttcgtgctggatgaggtgcccgactgcgacacgctgtggatgctggcgaccggcaccgccatcggcccctatttatcgattctgcagcaaggcgtcggcctggaacgctttaacaacctggtgctggtgcacgccgcgcgttttgcgcgcgatctgagctacctgccgctgatgcagcaactgcagcaacgctacaacggcaagctgcgcatccagaccgtcgtcagccgtgaagagacgcccggttcactgaccggccgcgtgccggcgctgatcgaggacggccggctggaagcggcgatcggcttgaccatcgacgccgaaaccagccacgtgatgctgtgcggcaacccgcagatggtgcgggacacccagcaaacgctgaaagaccaccgccaaatgcgcaagcacctgcgccgcaaaccgggccacatcaccagcgagcactactggtaacccgaggatcagcggaacttcaccggttcggcttccgggccgaaccgattgtctcccggcgtgccgacgaaggcgcccagatcgatagtcatcatcacgataatcagcgtcgggatgaaacgcccgacgccccattgccagatcggcgccagcatttgccagttgcccgccgccagcatccacgccaggatcagcagcaacgcccaccagccggccttgttgcgatcgtgcagacgtttgaccagcaccgccgccgtcggccagagcagcgccacgataaagaaggcgatggattggatggcgatcaattgataattggccagcgtaaacgccgccgccatcagcaccaaccacagccccatccagatccagaagtcgcgccgcccgatgcggcccttaaaagaaaaacaccactgttgtaacgtcatcgattcctgcgctctaagcctgcccatattctgcgccgcagtgtaacataggcgctgccgggccgagttttccgccttgcataacgcggcgcgccgcacagctttctcgtcagcgaaccgataatggcgtgggatctttgacaaggcctgcgggttatcgctttaatcggagccatctttgtccttgatgccatacgccatgctgagaaaaaccctcgccatcgcctgcctgctgcaggccgccgccagcgcctgggccgaaccgcccgccgccgaagcgaaaccgaccgcgccttacctgctggccggggcgccgaccttcgatctgacggtggtcaagttccgcgagaaatacaatcgcgacaaccccaagctgccgattggcgaattccgcgccattcccgccgccgaagacgattcgccgctgctgacgcgcgccgccagtaaactcaacgaaaacctgtacgcctccaccgcactggagaaaggtaccggtaaaatcaaaacgttgcagatcacgcatctgccgctgcagcaggccaatgaagaaaaagccgcgcgcgccatcgccatcaactacatggcggcgctgatgcgccagttcgaaccggcattgacggtggaacagagccagaacaaggtgaacagcctgctggaaaaaggcaaaggatcgcgcttttaccaacagcaggtcggcgccattcgctatgtcgtctcggacaacggcgataaaggcgtcaccttcgcggttgaaccgattaagctggcgctttccgagccgtaacggcgcggcatttaatgacgaaaagcaaagccttcgcgcttaatgatctctatactgttgggcaggtaaactgccggtccggcagttgtcatttcgactctcgcgttccctagttggaggaaaaaacatgcgtcatccattagttatgggtaactggaagcttaacggcagcacccacatggtcaacgaactgatcgccggtctgcgcaatgagctgagcagcgttgacggctgtggcgtcgccatcgccccgccggtgatgtatctggatcaggccaagcacgcgctggccggcagccgcatcgcgctgggcgcgcagaacgtggacgttaacctgtccggcgccttcaccggtgaagtttccgccaacatgctgaaagacgtcggcgctcagtacatcatcatcggccactccgagcgtcgcacctaccacaaagaaagcgacgaagtgatcgccgagaaattcgccgtgctgaaagaagccggcctgatcccggtgctatgcatcggtgaaaccgaagcggaaaacgccgcgggcaaaaccgaagaagtatgcgcgcgccagatcgacgccgtgctgaaaacgctgggcgcaccggcgatgaaaggcaccgtgatcgcctatgagccggtctgggccatcggtaccggcaaatccgccacccctgcgcaggcgcaggccgtgcacaaatttatccgcgatcacatcgccaagcacgatgccgcggttgccgctgaaatcatcatccagtacggcggttcggtgaacgacaagaacgccgcagagctgttctcccagccggacatcgatggcgcgctggttggcggcgcctcgctgaaagccgacgctttcgccgtgatcgtcaaagccgctgccgcagcgaaaaaagcctgattgccttaggcttgccataaaaaaaccccggcaagccggggttttttattgccgtttaaacggcatcagcgtttgctgatttcgtcgaatacgccgccggtggcgaagtgcaccttctgcgcttcggtccagccgccgaaggtgtcatctacggtgaacagcttcagctgcgggaactgcccggcgaacttggccgccaccgccgcatcgcgcgggcggtaatagtgctgtgccgcgatagtctgcccttccggcgaatacagatatttcaggtaggcggtcgccacctcacgggtaccgcgtttgtcgaccaccttatccaccaccgacaccgtcggttcggccaggatcgattcactcggggtgataatctcgaacttgtctttgcccaactctttctccgccagcagcgcttcgttttcccaggcgatcagcacgtcgccgatgccgcgctcaacgaaggtgttggtcgagccgcgcgcgccggaatccagcacctcgacgttcttgtacaggtttttgacgaagtcctgcgccttggccttatcgttgttgttgtggtgcaacgcgtagccccaggcggccaggtagttccagcgggcgccgccggaggttttcgggttcggggtgatcaccgacacgcccggcttgatcaaatcaggccagtcatgaatctgtttcgggttgcctttgcgcaccaggaagacgatggtcgaggtgtaaggcgccgaattgtccggcaggcgtttgatccagtctttctcgatgcgcccgcgttcggcgatggcgtcgacgtcataggctaacgccagcgtcaccacgtcggcctcgatgccgttgatcaccgacgtcgcctgcttgccggaaccgccgtgcgactggcgcaccgtcaccttgtcgccggtttccgcctggtagtgcttgctgaatgccgtgttgtaagcctgatagaactcacgcgtcggatcgtatgacacgttcagcaactgaatatccttcgccatggcgccggacgccaacagcaccaatgtcagacctacaccccatttacgcatcgacaggctctcccagaaaattaagcgcaacctcaatcggttgatttagcatcagagcctgccagaaactttcccggcaactaaagaataaaaaattttgggatagatgattctggaatatgtcaccggcgagcataaaaaagcccccgggagcggaggcttttttgtcgtgcggtaagtggcgtatcagtacagcttttttgccgtttccagccagtcgcccttgaacggacgcttcatgttttcgatcgcgtcgatgatgtcgtggtgcaccattttttcgttctggataccgacgcagcggccgccgtacccctgcagcagcagttcgatggcgtaggcgcccatgcgcgaggccaggatgcggtcataggcgaccggcgaaccgccgcgctgaatgtggcccagcacggtggcgcgggtttcacgcttggtttcctgctcaatgtggcgcgccagctcatcgatatcgcagatgtgctcggtgatcgccacgatggcgtgttttttgcctttggcgatgccggccttgatttcgcacaccagatcttcgcggttgaattcgatttcaggcagcacgataaattcgcagccgccggcaatcgccgccgccagcgtcagatcgccgcagtaacggcccatcacttccacgatggagatgcgctggtgcgacgaggaggtatcgcgcaggcggtcgatcgcttccaccacggtttccagcgcggtgaagtaaccgatggtgtagtcggtgccggcgacatcgttatcgatggtgcccggcagaccgatgcacgggaaaccttcttccgtcaggcgtttggcgcccatgtaggaaccgtcgccgccgatcaccaccagcgcgtcgatgccgcgattcttcaggttttcaatcgccttggcacgcacgttttcatccctgaactccgggaagcgggccgaaccaaggaaggtgccgccgcgattgatcatgtcggacacgctatagcggtccagctgctccatgcgatcttcgtataagccaaggtagccatcgtaaataccaaaaacttccagaccttctgaaagcgcagaacgcacaacgccgcggattgcagcgttcatacccggcgaatcaccgccgctcgtcagtacaccgattttcttgatcatgactacctctgaactgtgtagatgcaatttcttaagaattctgtctccgccgatcgtcttgaaacctctccggctgcagaaaaccagctttacggcttattgctggatattatatcaaaaacacccagctgaattgattcaagtcacgcaatataacggttaaaacaccgcatggcacgctgagctaactcagatattcatgataatacgttgcgctatgcctctatatgattatagctcccaatgcccctgcctacccggtggcaccacggagcacggatccaggtgaatgatgacatccgcccccgcaaaacgttgccgcagggcttgttccacctgatcggccaagcggtgcgcctcgcgcagcggcagcgtgtcctccatctccagatgcagctggatgaaacgcgtcggccccgactgacgcgtgcgcagatcgtgtgcgcctttcacgccgggccaggaggaaaccacggcgataatcgcctggcgctcgtcatccggcaacgcccgatccaacagcgactgcaccgcttcatagcccatgcgcagcgcgctatagaggatgtaaacgccgatgcccagcgcgaacaacgcatccgcccgttggaagccgtaccagcttagcccaagagcgataagaatagcaccattcatcatgacatctgactgataatgcagcatatctgcgcgcacggcctggctgcgcgtttttctgaccacccagcgttgataggtgaccagcatcagggtgctgactaacgcgatcaccgtcacgacgaccccaacgccgggatcgcgcagcgtttgcggtgcatacagatgctggaagccggtgagaaacagaaacagggcggaaccggaaataaacatgctttgcgccagcgccgccagcgactccgctttgccgtggccaaaggtgtgctcggcatcggcaggctgcagcgaatagcgcaccaccagcaggttggtcagcgaggcggcgatatcgaccagcgaatccaccagcgccgccagcaggctgacagaaccggtctggtaccaggcgacgattttgatcagcaacagcgacgacgccagcgcggtagcggccaacgcagcggactttaccaggcgtgcatagcgctgttccattgagggatcccggtcaaaaggtatggcgctcaatatagcgaaatgtcggataaaaaaaaccccgccatcatggcggggaagacagggatggtgtctatggcaaggaaaaacaggggactactcagtcgtacttcacttctgggcagaagcttgctgcaaaccagaaatttgttgctccatctgctgcatgcgctgctgatgtttctggtctaaaacacttttttgctctggcgtcagcaggttatacatttggttgcgcacccgggccatttcgacctggcgcttgacctgctgttgggccatcttttccgcctgggcatacacggcggcttcgtcaaatttctctgcggtcaccagtttatgcatggcttccatttcagctacattgacaccaggcagatcgtgccgggcctggcgcatcaaatcgcgcatttgctggcgctgctgttcgctgaggctgacaccgtcgaacatatggtgctggccgggtattcgggtcatcgcgtcgttgccgggaggttgggctgtgtccggtatagtgtcggcagcgaaggcagcggtcgaaccaattgccagcagtgatgccataactaatgcggtcaccttacgcatttcaactcctcaagctttctcactttgcgaatcaacgaggagcagtgtaccgccgcacctgaaaacctgcgtcagtgcatgtaaaactacgtaaagtcatggaatggcaacagttgatgacgtattttgcgtctggaggtaaatcataatgaacaagattctgttagttgacgacgaccgcgagttgacctcgctgttaaaagaactgcttgaaatggaaggttttaatatcgtcgtcgcgcacgatggcgagcaggcgttgtcgctgctggacagctccgtcgatctgctgctgctcgacatcatgatgccgaagaaaaacggcatcgatacgctgaaagaactgcgccaacatcaccagacgccggtcatcatgctgaccgcgcgcggcagcgaactggaccgcgtgttgggcctggagctgggcgccgatgattacctgccgaaacccttcaacgatcgcgaactggtcgcgcgcattcgcgccattctgcgccgttccaactggagcgaacagcagcagcaggtcgacagcggcgccccgacgctggatgtcgatggcctgcagctgaaccccggccgccaggaggccagcttcgacggccaggtgctggatctgaccggcaccgagttcaccctgctgtatctgctggcgcaacatctcggccaggtggtgtcgcgcgaactgctgagccaggaagtgctgggcaaacgcctgactccgttcgatcgcgccatcgacatgcatatctccaacctgcggcgtaagctgccggatcgcaaagacgggcatccgtggttcaaaaccctgcgcgggcgtggttatttgatggtatctgcaacatgatcaacagtttgacggcacgcatcttcgccattttctggttcacgttagccctggtgctaatgctggtgctgatggtgcccaagctcgactcccgccaaatgacctcgctgctcgacagcgagcagcggcaggggttgatgctggaacagcacgtcgaggccgagttgcaaaacgatccggccaacgatctgatgtggtggcgccgcctgttccgcgccatcgacaaatgggcgccgccgggccaacgcctgctgctggtcaccagcgaaggccgggtgatcggcgcgcagcgcaatgaaatgcagatcgtccgcaacttcatcggccaatccgacaattcggatcatccgaagaagaaaaagtacggccgcgtcgaactggtcgggccgttcgcggtgcgcgacggcgaagacaactaccagctgtacctgatccgccccgccaacagcccgcaatccgatttcatcaacctgatgttcgaccggccgctgctgctgctgatcgtcaccatgctgatcagcgccccgctgctgctgtggctggcctggagcctggcgaaaccggcgcgcaagctgaagaacgccgccgatgacgtggcgcgcggcaacctgaagcagcatccggaactggaggccggcccgcaggaatttctggccaccggcgccagcttcaaccagatggtcagcgcgctggaacgcatgatgaacgcccagcaacgcttgatctcggacatctcgcacgagctgcgcacgccgctgactcgcctgcagctggccaccgcgctgatgcgccgccgccacggcgaaggccacgagctggcgcgcatcgaaaccgaagcgcaacggctggattcgatgatcaacgatctgctggcgctgtcgcgcgggcagcagaagggcgagctggcgcgcgagcagttgaaggccaacgaactgtgggccgacgtgctggataacgcccgtttcgaagccgaacagatgggcaagcagctggagatcgctgcgccgcccggtccgtggacgctgttcggcaacgcgagcgcgctggacagcgcgttggaaaacatcgtgcgcaacgccctgcgttattcgcacacccgcatcgccgtggcgttcagcgccgacaatcagggcgtgactatccaggttgacgacgacggccccggcgtcagcgccgaagaccgcgagcagatcttccgtccgttctaccgcaccgatgaggcgcgcgaccgtgagtccggcggcaccggccttggcctggctatcgtcgaggcggcggtcaatcagcatcgcggctgggtgaaggccgaagacagcccgcttggcggtctgcggctggtgctgtggctgccgctgcatcatcaacgcctatcgtctaagacagaacagtaagagtttgctatcctgcgcccctcgttcacgaggggcctgcaacatgctgaacatcgttttatttgaacccgaaattccacccaataccggcaatatcatccgcctgtgcgccaataccggctttaatctgcacctgatcgaaccgctgggtttcccgtgggacgacaaacgcctgcgccgcgccgggctggactatcatgagttcacccgcgtcagccgccatgccgattacgccgcctttctcgccgccgaaaacccgcagcggctgtttgccctcaccaccaaaggcacgccggcgcacagcgccgtcagctaccaggccggcgactacctgctgttcggcccggaaacgcgcgggttgcctgccgacatcctcgatgcgctgcccgcgcagcaaaaaatccgcatcccgatgcaggcgcaaagccgcagcatgaacctgtcgaatgccgtatcggtggtggtgtatgaagcctggcggcagctgggctatgccggtgcgctgatcaaggcgtaatccgcgacgtcgcgccatactggaagagtcatcctttccaggcacggcatatggctttcgtcgcagagattgtcacccagcttcgccggctcgaaccggcgctgaacgaggcgctgttgcggctgcaacaggcgcaagacagcgaagcgctgcacgacttgcgcgtctgtctgcgccgcattcgcagcctgctgcgcccgttacgcggctgccccggcgcaacccggctcgatcgggccgccgccgaattgggcaggctcacgacgccgctgcgcgatctcgaggtgctgatcgccgaactggcgcgacatcgcctcgattggcaggccaacgtgcgccagagcgaatttcaggcccgctaccgtcaactgctcacccatccgcagctcatcggctttccctcgcttttgcacgcctggccgcgccgctttcgccgcagcgcgcaacgcgtcgccaaacaccgcctgaataaacacctgcagcgccaacaacggcaattgcgccgggcattggccgataccggctacgatcgccaccgcctgcggctgctgataaaacgcctgcgttacgcggctgaagcctatccgcagcgccttcccctctcccccgccgcgatggcgagcctgaaagcggcgcagaacgccctcggtgattggcacgaccgggaggtttggtgcctgcaagccgaacatcaggcggatctctggcccttgttgccccggtggcaagctgagcaacgccaggcgctggtcagcgcggacgccttgctcgccgccttatcaccggcactggcggcgaaaaccggcggcgcatcacgatcctgaaaaaaggccgcagcagggcacgcccggccccgaaaaagcccgatgaggcgcagataatgcgctatgttttgtaagggtaatcaccactcatcataggaaaccatatgaagaaacaacgtttgagcgttgccatggcggttctggcggcgggcctgttgctggcgggctgctcgtccaaagtcacccaaacgaatcaatattcggggttcctaccggactacagcaagctgcaggaaaccagctcgccaagcggccataaaacgctgcgttggatcgatcccacctttaaagagtcgaattatcgcggcgtgtatgtcgctcccgtggtttattacccggcggctaaacccaccgcccgcgtcagccaacaaacgctggacaaaattagaaactataccgaccaaagcgtgagaaaagcggtggccgagcgcactaccgttttgaataacccgacaggttcccgcgtgctgttggccaaagtcgcgattaccgccgtgtctgccgaagatgaggatatgaaattctatgaagtggtgccggtagcggccgtggtggccagcaccatggccgccactggccaccggacgcaaaacaccacgctgttcctggaagcgcagttgatcgatcaggatagcggtaaaacggtgctggaagtggtgcgcaagagttacggcaaaaccgtcaacaacgacagcgcgccagtcacggaacaagaagtcaaagcggcgatcgatgacatggtcaacgacatcgtcacattcccgaaacagggctgaccgccgcctgaaaaacacagggggagccgaagctccccctgaatggacccgcaggcgcggcttagatgccgtcgccgtactcgaagccgtggttggtgccgttgaagtattggtccatatccatcgacggcgtatcgctctccggccgcccgacgatgcgcgccggcacgccggcggcggtggtgtgcggcggtatcgcctgcaagaccaccgagcccgcaccgatcttcgcgcccttgcccacttcgatattgccgagaattttggcgcctgcgccaatcatcaccccttcacggattttcgggtgacggtcgccgctggttttaccggtaccgcccagggtgaccgattgcaggatagagacgttgttctccaccaccgccgtttcaccgatcacgatgccggtggcgtggtcgagcatgatgccgcaaccgatggtcgccgccgggtggatgtctacgccgaaggcgacggaaatttgattttgcaggtagatagccagcgcctgccgcccttgctgccacagccagtggccgatgcggtaagcctgcagcgcgtggaaccctttcaggtaaagcagcggcgtggagtatttatcgaccgccgggtcgcgcaggcgcaccgcgaggatatcgcgcgccgccgaaacgatcatctggttgtcagacttgtaggcctcttccaccacctcacgcaccgcgatggcgggcatgatcggcgtggccagcttgttggccagcatatagctgagcgcgctgcccaggttctcgtgcttgagcaacgtcgcatggaaaaagctggccagcatcggttcacaatcagccagtgctcgcgcttctgatttaatgctgttccagacctgttccaactcttctgacgacatcacatacccctttaccttgccaaacgggccgcttcacacggtagcgcgaagcggcccaggtcatttgcggggtcagcattccgctgccccgacatatcgttttatgtcacgcgctgggtttttcgtcctttcgggctcgccccagcaggctcagcgccgcttcgcgggcgtccttgtggcagtaaagcacctgataaatctgttcggtgatcggcatttccacaccgtgccgctgcgccaacgccaacacctctttggtattgcgatagccctcgaccacctgaccgatactgtcctgcgcttcctgcacgcctttaccctgccccagcataatgccgaagcgacggttgcgcgactggttgtccgtgcaggttagcaccagatcccccagccccgccatgcccatgaacgtcgagggatcggcgcccagcgcagaacccagacggctcatttccgccagcccgcgcgtaatcaacgcggtacgggcattggcgccgaaaccgatgccgtcggacatgccggcgccgatggcgatcacgttcttcactgcgccgccaagctgcacaccgatgaagtcgggattgctgtagacgcggaaactcttgccgcagtgcagcagctgttgcagatcgtcggcgaactgcgcatcggtcgccgccagcgcgattgccgtcggcaggccggcggccagctctttggcgaacgtcggcccggagagcaccgccagcgggatcgcctcgcccaacgcctcacgcgccacgtcctgcagcaagcggccggtttccgcttccaaccctttggtggcccacacgatgcgggcatccgggcgcagatgcggcttcagctggcgcagcacgtcgccgaacacgtggctcggcaccaccaccagcacgtcgcggctggcggccagcgcacgcgccaaatcggcttcgagcagcagggtatcggggaagggaacgtcaggcagaaacgcctgattgcagcgatcgtgctgcaacgtttgaatttgcgcggggttatgtccccacaacaccacgggatgaccgttacgcgccagcgtaatggccaatgcggtgccgtacgagccggcaccgataacagtcattgaagcattgacggtgttcatcaggcatcctgatgtggtgcggcaccttcgccttccgcctgctgctgcagatagttcatgaacagcgcgtcaaagttgaccggtgccagattcagctgcgggaaggtgccgcgggaaaccaggctggtgatgcactcgcgcgcatacgggaacaggatgttcgggcagtatgcacccaggcaatgcgccagctgcgtgccttcgatgcctgctaccgagaagatgcccgcctgctgcacttcgcacaggaacgcagtctcttcgcccagggtcgccgtcacggttacgcgcagtaccacttcatacacttcgtcagccagctggctggacgcggtatccagatcaagtttaacttccggctgccattcctgctggaaaacctgcggcgcgttcggcgcttcgaaggagatatccttggtatagatacgttggatctggaaagccatttcggtgctgttttgttctgacatgtgagtaatacccttggttaaacgtccttattgacactcggtgaaccggcaagctgcttaaagcagcggatccaggccgccgcgagcatcgagttcatataaatcatcgcagccgccgatatgccggccgtcgatgaaaatctgcggcacggtggtgcgcccgctgcgctcgatcatcacttcgcgcttggcgttatcgccgtcgatggcgatctcgttaaacgccgcgcccttgctgttcaacagcgccttggcgcgatggcagaacgggcaggtcgctttggtgtagatatcaatgttagccatggattgccacctcaaataggttaaacggttacttaccgcgcaccagcggcaggttttctccgctccagccggcaatgccgtctttcagcatagtcaccttttcaaaaccggccttgctcaggttctccgccggctcgcgggaggcggtgccgttggcgcacacgacgatgatcggctgcgctttgtgtttttccagctcgcccaggctgccgtttttgatttcgctggcggtcaggttgatggcgttggccaggtgaccacggcggaaatcgtcgcggctgcgggtatcgaccaccacggcttcttctttgttgatcaggcgaatggcttcaccgcgggcgatctctttgaccttggagaaacggcttttgaaggtcatgacgatcacggcgaccagcagagcgatccaagccaggctcagaatagggtgtctgcttacgaatggcataatttcttgcagcatggggtgtaacaactcccgtcagttaagggataaataagtcaaggttccagagtatacctgccgagtgcggcaaatacagccaataagcaagcgcgattgtagaaactgcgggctgcgctgagaaattcccgaggtcagagcataaaagcccgcgcgattcgccgcaaccttgatctctttgggctatttatcgccggcggcggtgtaaaatcagccggtttttcgagggcgaatagccatgcttgcggcgggcgcatggctattcgcagcttaaaaagttcataagaggtcaatgcaatgtcgaacaacaaaaaaccgatggtcctggtgatcctggacggttacggccaccgtgaagagcgacaggacaacgcgatcctgaacgccggcaccccggtgatggatcgtctgtggcgggagcagccgcatacgctgatcgccgcctccgggctggatgtcggcctgcccgatgggcaaatgggcaactccgaagtcggccacgtcaatctgggcgccgggcgcatcgtgtaccaggatctgacccggctggacaaagcgatcgccgacggcgacttctttaccaacccggtgctgaccgccgccgtcgataaggccgtagcggccggcaaggcggtgcatatcatgggcctgctgtcgccgggcggcgtgcacagccatgacgagcacatcctggccatgatcaagctggccgcccaacgcggcgccaaagccatttatctgcatgccttccttgacgggcgcgacacgccgccacgcagcgccgaagccccgctgcaacgctgccgcgacgccttcgccgcgttgggcgtcgggcgcatcgcctcgctgatcggccgctactacgcgatggaccgcgacaaccgctgggatcgcgtgcagctggcctatgacctgctgaccgcggccaaaggcgattccgtggccgaggatgcgatcgccggcctgcaggccgcttatcagcgcggtgaaaacgacgagttcgtcagaccgaccgtgatccgcgccgccggtgaggccgatgccgcaatgcaggacggcgacgcgttgatcttcatgaacttccgcgctgaccgcgcgcgccagatcacccgcgctttcgtgaacgccgacttcgacggtttcccgcgcgccaagcaggcgcagttcggcgatttcgtgatgctgaccgaatacgccgccgacatcgcgaccgcctgcgcctatccgccggcgccgctggccaacaccttcggcgaatggctgatgaagcacgacaaaacccagttgcgcatctcggaaaccgaaaaatacgcccacgtcaccttcttctataacggcggcgtggaagcgccgttcaagggcgaagaccgcgtgctggtcaactcgccgcaggtcgccacctacgatttgcagcctgagatgagcgccgccgagctgaccgacaagctgctgaccgccatccgcagcggcaaatacgacgccatcatctgcaactacccgaacggcgacatggtggggcataccggcgtgtatgaagcggcggtcaaagcggtggaaacgctggacgcctgcatcgcccaggtggttgatgcggtgcgcgacgtcgacggccaactgctgatcaccgccgatcacggcaacgccgagcagatgcgcgatccggccaccggccaggcgcacaccgcccacaccagcctgccggtgccgctgatttacgtcggcaaaccggcgcgcgcggtcgaaggcggcaagctttcggacatcgcgccaaccctgttaacgctgatgggaatggaaatcccgcaagagatgactggtaagccgctgttcatcgtggaataatccttctccatgagggagaaggcgttttttgcactatcaagggtaacccgaagcgcaaacgcaggcagccggccgctgcctgaacgcaccgcgccaaggacgttcaccgccatgtgcgccagcgtattttgcgctggcgtcttgctgttgccgctcgccggccaggcggcggaagacaataaatcccagctgaaagacatccagcagagcatcgccgagaaagaaaaggcggtgaagcagcagcaacagcagcgcagctcgctgcaggatcagctgcgtcaacaggaaaaaaccatcgcccaggccagccgccagttgcgcgacacccagggcacgctcacccagttgggcaaggacatttccggcctgaacgcctcgatagccaaactgcaaaaacagcaatcgacccagcaaaacctcctcgccaaacagctcgacgccgccttccggcaagggcagcacagcgccgtgcagctgatcctcagcggtgaagaaagccagcgcagcgaacgtattctggcctatttcggttatctgaacgaagcgcgccagaaaaccatcgaagagctgaaacagacccgcgccgagctggcgaagcaaaaaaccacgctggtggccaaacagggccagcaaaaatccttactgagcgaacaacagacgcagcagcagaagctggagcaggcgcgcggcgcccgcaagaaaacgctgaccgcgctggaagcctcgctggaaaaagaccaacaacgcctggtggaactgcgccaaaacgaagcccgcatgcgcgacaagatcgcccgagcggagcgcgaagcccgtgcgcgcgccgaacgcgaagcgcgtgaagcggccaaggtgcgcgaacaggtgcgcatcaaggaacagcaggcgaagaaaaccggcaccacctacaaacctagcgaagccgatcgctcgctgatggcgcgaaccggcggcctcggtcgtccggccggccagctgatgtggccggtgcgcggccgcacgctgcacggctttggcgagcagcagcagggcgagctacgctggaaaggcatggtgatcgaagcccgcgaaggcagcgaagtgaaagccgtcgccgatggccgcgtgctgctggccgactggctgcaaggctatggcctgatggtggtggtcgaacacggtaaaggcgacatgagcgtgtacggctacaaccaaagcgcgttggtcaacgtcggggcgcaggtgcgcgctggccagccgatcgctctggtcggcaccagcggcggccagggaacgccgtcgctctatttcgaaatccgtcgtcagggacaggcggttaacccactgccgtggttgggaagatagatttgcgttatgtcaaaacccgtacagctttgttaatcggctgtctgctgcaggtttacgctgcgcaggcaggaaaactctccatcgtcatcgatgacgtgggctaccgccctcacgaagaaaacgcggtgctgcaaatgccgacggcgatctcggtcgcagtcttgcccaacgcgccgcatgcccgcctgatggccacccgcgcccacagccagggccgcgaagtcttgatccacatgccgatggcgccgctcagcaagcagccgctggaacgcgataccctgcagccttccatgagcagcgacgagatccagcgcatcatccgcaacgcggtgaacaacgtgccctacgcggtcggcatgaacaaccacatgggcagcgccatgacctccagcctgccgggcatgcagaaagtgatgcaggcgctcgaaagctatcgtctgtatttcctcgacagcatgaccatcggcagcagccaggcgacccgcgccgcggccggcaccggcgtgaaagtgatcaaacgcagggtgttcctcgacgataccgcgaacgaagccgatatccgccgtcagttcaaccgcgcggttgaattggcgcggcgcaacggttccgccatcgccatcggccacccgcgcccggcgacggtgaaagtgctgcagcagatgctgccgtcgctgcccgccgatatcgtgctggtcaaaccgagcgcgctgctgaacgaaccgcagggcaacggcggtggcagctacgttccgccgccggtcaaaccgcaaaaaccgcagccgaagaacccgttcagcggcggcatcaagcagtgcaaggtcaaaccgccgaaggaaaaagccaacgccggcaccgcgctgggcgttatcgccgacagcattgccacctcgccgccggtgaccttcatcaagcgtcattggcagcactggacgcaaaccaaaccgcaagcataaaaaaagggccggaattccggcccttttcacgcctgccgagatcaatcccagctcagcaccactttgcccgatttgccggagcgcatggcgtcgaagccctgctggtactcgtcgatcgagaaacggtgggtgatgatcggggtcaaatccagaccggactggatcagcgccgccatcttgtaccaggtttcgaacatttcgcggccgtaaatccctttgataaacagccctttgaagatgacctgattccagtcgatcgacatatccgaaggcggaatgcccagcatggcgatacgcccgccgtggttcatcgcattgagcagcgtgcggaacgccggcggcgcgccggacatttccaggccgacatcgaacccttcggtcatgcccagttcggccatcacgtcgctgaggttttccttgctgacgttcaccgcacgggtcacgcccattttgcgcgccagttccaggcggtattcgttaacgtcggtgatcaccacatggcgggcgccgacgtgtttgcacaccgccgccgccataatgccgatcgggccggcgccggacaccagcacgtcttccccgaccagatcgaacgacagcgcggtatgcaccgcgttaccgaacggatcaaagatcgaagccagttcatcggagatgttatccgggatcttgaaggcgttgaacgccgggatcaccaggtattccgcgaagctgcccgggcggttcacgcccacgccgacggtgttgcggcacaggtgcgtgcggccgccgcggcagttgcggcagtggccgcaggtgatgtggccttcgccggacacgcgatcgccgatgttgaagcctttgacttcctgaccgatcgccaccacttcgcccacgtattcatggccgaccaccatcggaaccggaatggttttttgcgaccactcgtcccagttgtagatatgcacatcggtgccgcagatcgcggttttgcggattttgatcatgatgtcgttgtggcccagctccggctgaggcacgtcggtcatccaaatcccttcttccgctttcagttttgacagtgctttcatggttttaccttatgcaataacgccaagatccttaccgatacgtgtaaacgccgccactgcgcgttcgatttgctccggggtgtggtcggcggacatctgggtgcggatgcgcgcctggcctttcggcaccaccggatagaagaaaccggtcacatagatgccttccttgagcaacgcattggcgaattcctgcgccaacttcgcctcacccagcatcaccgggatgatggcgtgatcggcgccggccaacgtgaagccggcggcggtcattttttcgcggaacagacgcgcattggcccacaggcgatcgcgcagggcatcgccctcttccagcagttccagcactttgatcgacgcggcgacgatcgccggcgccagcgagttggagaacaggtacgggcgcgaacgctggcgcagccactccaccacttctttcttggcggcggtgtagccgccggacgcgccgcccagcgctttgcctaacgtaccggtgatgatatcgacgcggcccatcacttcgcagtattcatgggtgccgcgcccgttggcgccgacaaagcccaccgcgtgagagtcatccaccatcaccaacgcctggtattcgtccgccagatcgcaaacccctttcaggttggcgatcacgccgtccatcgagaagacgccgtcggtggcgatcaggatgtgacgcgcgccgtcggctttggcctgcttcagctgcgcggccagctcggtcatgtcgttattggcatagcgataacgcttggccttgcacaggcgcacgccgtcgatgatcgacgcgtggttcagcgcatcggagataatggcgtcttccgggccgagcagggtttcgaacagcccgccgttggcgtcgaagcaagaggagtacaggatcgcgtcttccatgcccaaaaaggccgccagtttctgttccagctgcttgtggctgtcctgggtgccgcagatgaagcgcaccgacgccatgccgaaaccgtggctgtccatgcccgacttggcggcggcgatcagcgccgggtggttggccaggcccaggtagttattggcgcagaagttgatcacatggctgccgtcggcgacggcgatatccgcctgttgcgcggaggtgatgatgcgttcttccttgaacagcccttcactgcgcgtggcggcaagctgttgttccaactgctgataaaaagacgctgacattcggttatctccaggattgggctatttgcggcatattttactgatttgtaaccaaactgacgagaatgcgcgggagagaatattaaaattgcagcagatatcacggcaaacggcggacttcaatggcaatgcgggatattcggagcccttccgctgtttgccgcggcatgaaatgctattataaccgccattgagcgtggggcattgtgccccgccaggcagcttagcaggggtaacccaatgattatcgtcacaggcggcgccggcatgatcggcagcaacatcattaaggcactgaacgacaagggatatcgcgatatcctggtggtggataacctgaaagacggcaccaagttcgtcaacctggtcgatctggatatcgccgactatatcgataaagaagactttatcgccagcatcgtggccggcgacgatctgggcgagatcgaagcggtgttccacgaaggcgcctgctccgcgaccaccgagtgggacggcaagtacatgatggacaataactatcagtactccaaagacctgctgcactactgcctggatcgcgaaatcccgttcttgtatgcctcctccgccgccacttacggcggccgcgaagagttcatcgaagagcgtgagtatgaagcgccgctcaacgtttacggctactccaaattcctgttcgatcaatacgtgcgcgagatcctgccggaagcggactcgcagatctgcggcttccgctacttcaacgtttatggcccgcgcgaaggccacaaaggcagcatggccagcgtcgccttccacctgaatacccagatcaaccgcggcgaaaacccgaaactgttcgccggcagcgaaaacttcaagcgtgacttcatctacgtcggcgacgtggcggcggttaacctgtggttctgggaaaccggcaaatccggcatcttcaactgcggcaccggccgagcggaaaccttccaggcggtagccgacgcggtggtggacttccaccagaaaggcgctgtggaatacatcgagttcccggagaagctgaaaggccgctatcaggcgtacacccaggccgatctgaccaagctgcgcgcggccggctacgacgcaccgttcaaaacggtcgccgaaggcgtgaaagagtacatggcctggttgaaccgcaccgcataagctgaaggaattaacgctgggtatgaaaatactggttatcggcccttcttgggttggcgacatgatgatgtcgcaaagtctctatcgcaccctgaaggccgaatacccgtcggcggagatcgatgtgatggcgccggcctggtgtcgcccgttgctggcgcgcatgccggaagtcaatcaggcgctggcgatgccgctgggccacggcgcgctggggctcggcgagcgccgccgcctggggcgcgctctgcgcgccaaccgttacgatcgcgcttacgttctgcccaactcgttcaaatccgcgctggtgcctttcttcgccgatatcccgcagcgcaccggctggcggggcgaaatgcgctacggcctgctgaacgacgtccgcgtgctcgacaaggccgctttcccgctgatggtgcagcgctatgtggcgctggcctatgacaaaggccgcgttcagcgcgccgacgatctgccgcagccactgctgtggccgcagctgcgggtgagcgacgaagagatcgccgacaccaccgcggccttcaacctgaccgacagccgcccgatcgtcggcttctgcccaggcgcggagttcggccccgccaagcgctggccgcactatcactacgcggcgctggctcagcggctgatcgagagcggctatcaaatcgcgctgttcggttcggcgaaagaccatgaggccggcgaacagatccgcgccgcattgcaggaagacgcgcgcgatttctgccttaatctggccgggaaaacccagctggagcaagcagttatcctgatcgcagcctgccgggcggtggtcagcaacgactccggtttaatgcacgttgccgcagcgttgaacaaaccgctgatagccttgtacgggccaagcagccccgacttcacaccgccgctttccgacaaggcgcgggtcattcgcctgatcagcggctaccacaaggtgcgtaagggcgatgccgagcagggataccaccaaagtttgatcgatattcagccgcagcaagtgttggatgcgctgacgccgttacttgtcgccagcgaggaatagtcatgcaggtgttaattgtaaaaacctcctcgatgggggacgtgctgcatacgctgcccgccctgaccgacgcgctgcaggccattcccgatatccgcttcgactgggtggtggaagaaggcttcagccaaatccccacctggcacccggcggtagatcgcgtgatcccggtggccattcgccgctggcgaaaaaactggttcggcaacgatactcggcaacagcgctgcgacttcaagcgcgcgctgcaagaacgccgttacgacgtggtgatcgacgcgcagggcctgatcaaaagcgccgcgctgatcacgcgcatcgctaaaggcaacaaacatggcccggactgcaagagcgcgcgcgagccgttcgccagctggttctacaatgtgcgccatgaggtagacaaacagcagcacgcggtggaacgcacgcgcgaactgttcgccaaaagcctcggctacgataaaccgggcagctacggcgattacgccatcgccgcacgctttctcagccgcccgccggccgatgccgggcagtatttggtgtttctgcacgcgacgacccgtgacgataagcattggccggagcaaaactggcgtgagctgatcgcgctggcggcggacagcgggctgaagatcaaactgccgtggggcgcagagcatgaacatcagcgcgcgctgcgcttggcggaaggttttccacatgtcgaggtgctgccgaaactcagcctgcagcaggtggccgaggtgctggccggcgccaggggagtgatctcggtcgacaccgggctcagccatttgaccgccgcgctcgacaaaccgaacatcacgctgttcgggccgaccgatcccggcctgatcggcggttacgggcaaaatcagcactcgctgatttcgccggaaaaaagcatggcgacaatcgacgccgatacggcatggcaggcgctgcaaaaggttatagcatgaaaaaactgcacattatcaacctgggtaaaatgggcggcgtcgagcgcctgttcctgcagtacatcaacgataccaccgacggcagcaaccaggtcctgtgcatcagcggcgacattggcgaagagatccgccgccagttgccggcgcatcagcccgtcaccttcgccaaccgcctgatcaatgcgttgccgttgcgttgcccgcagttcctgcgcaaatttttgctgaaatggaaaattgaacgggcgaacgccgacgtggtgatcgtctgggacctggtgccggggctggcggccaaacccaagcgcggcaagctggtttactacgatcacggctgctcctggcgttaccccaagaataaaaagacgctgcgtttcttcgccatgctggacggcgtgatttccgcctcacacgcgtcgaagcgggtgatggagctgcgctttaatctgccttgcccaaatcacgtggtgatcaaccgcatcaagacgccggcggggatcgacgctgcgccgaaaacgctgtcgcagccggtcaggatcggcactgcctcacgcctggtcagcctgaaaggcatcagcgtttcattattgatgatgcaggaactgctgcggcgcgggcatgacgtcacgctggaagtggccggcaaagggccggatcgcgcggcgttcgaggcgctggcggcacggcttcagctcggcgatcgcgccaccttcagcggttataaggatgacgtcgccggcttcttcaatcgcacgcacatctacatgagcacgccgatcaccgagccgttcggcttgtcctgcatggaatcgctctatttcggcgtgccggtcatcttcccgcaggtcgacggccagccggaagcggtcagggacggggtctgcggccttggcctgacgccgtcggtcaccatcgaacaacaccggcagctcaccgatatcgaggtcgacttcccgcatgaggtctacgatccgcagaccgacagcctggtggcgcccaagctgctgtcgcatatcgactgtgcggatgccgttgagaaattgctggagcgagaaacctaccagactctgagccgaaatgcgcagcgctatcctgcggagcatttcaactatgctcagttcaaagttgagttcgacgacacgctgcgctccttcatcgcttaattaaaacgtgagccggaaaacacgcccaatgttaaaacacagaacaccgcaccctgccttcagctatttaatctatctggggtgcgccatcgctttttgcaccattcctttcggttccgcgaccggacgcaatctgttttatgtttccagctacatcgcctttatcgccgtttgcctgtatccgcgctattacctcagcaacgttaaaaatctgctgttgccggcgctgatgttcagcgtcggcatggggaccatcctctggatgcaccacttcaaacagccgggtgaatacatcaacatttaccgctcttatatgtcgaccggtaaactccaactggcaaccgccttcatcctgctgattgcgcttaatgagcggttgtgcgtgcagcgcctgctcgttgtcgtggccctcattaccggtctggcggtcaacggttattcactctatcaggggctgcggctggatattccgcgcgtggagctcaacttcgatcgcgccacggtcgttgcctacctgatgaccgccatcgatctggtgatgatgcaagccatcctgatgctgcgcacccgctaccgtctggtgttgtacattgcggcgttcctgctgtccttctctgcgctggtgctcaccggcacgcgcgcggccatgttggtttacccggtggcggtttgtctgtcgctgctggcgaccaagcatctggtatccagaaaacacaagtttttgctggtctcctcggtgccattattgctactcatctgcggattcgtctttaaagcgcagattgaacaacgcattgccgacttcaaaaccaacatgcaactgatcgataaacctgagatagataactcgatcatttcccggctgtcgatgcaaacgctggcatggcgtaccggttcacaagcgccttggggccaatccgccgaacaacgcggtgaagagatccgcgccatcgtcgcgcagcagccacatctgtacggcgtcatgccctacatcaacgtccacctgcacaacgaactgctggaaacctactcgctcaagggcgtctggggcgtactgctgctgctggcgctgtatatcggcctgttctgctcttcgttccggccgcagcgcaacgcgttactgctgagcgtcagcgccagcctgttcgtttacggcctgagcgacgtcatcttcttcagcacggaaggcaccgtcatgttctgtctggcgctgatcgccgccgttctttccgttacgaaacagcccccagttcaggagcccaccttgtgaatcctcagcagccgctgctcagcgttatcgtgccgttttataataatgaagcgttcgttatcgctgcgctggattcgttatttgtacagattagcgacgatatcgaagtggtgatcatcgacgatggctctaccgatgcgtcaggggcgctggtcagccactatctggcgcagcggcggcacccgcgcgcggtccttacttcgcaggccaacggcggcattgcgcacgcccgcaacgtcggcctacagcaggccaccgggcgctatatcacctttctcgacggagacgatctgctgagcgacgactatctggcgatcctgcgccccctgctgatcgccggtgaatatgacctgatcgattttaattatcagaagttcaccgaacatccgtcgacaccggataaccgcgcggcgcagaccgtagcctacgacttttcacagttggggctcggctgcctgcaaccgctgtttgcacgttcgatgtggcatctctggagccgggtatataaacgcacgctgctggaaggggaggcgttcgaagacggcaggcgctacgaagacgtgattttcacgccttttcagtatttcaaaactcgccgcatcgcccatcttgactgcgaactctacttctatcgggacaacagccagggcatcacccgcaatatcaaacccaaagatattgaagatctgctgttcgccatggagaagatgctgcgttttgtggcgcagcatcccggggatgagccgctgcgccggttagccgccctgatgctggccaactgcttttccgaggtgaaaagcatgtcgaaggcggtatacggctattaccattacgcaccggcaacgctgcatatcctgcgccgcgccgccgctgtctgccgcaacagcgacgtgccgggcaaaaaagtccgccagatgcgctatgcgcgagtagatacctttctttcgaagctgcgcgggcgcaggccgcactaatcgcatcggccgggcggccgatgcgtcgtctcgcctttagcgcgctaaaggcacgtgcgcgaccagctcgtcataaatccgctgcggctggataacccccatcgggctttccgcctccagcggcattgtataaccggtacgagacacctgaatgatgcgatgcagttcaggatcctgaatcggcccggtggagcgtgagtcggcggtcacgaacagactgatggttttcaccttcaatgccactgccagatgcagcggcccggtatcgccggtaaccagaacatggaaactgtcgagcaacgtcagcaaaccttgcagccccgttttaccgatctggttatccacgcaggcctgcgtttgcgggccgatcagactcaaaaactgtttggccttgccgtcgtcaaacggtgcgccaatcagcacgatgcgtacatttgggtgcttcgccaccagctcatcggccagccgcgcatagtgcgcaaccggccagcaacgcgactccgttgacgcccccagctgaaaaccgatggtgggatgctcgctgcttttgacgccgcgctgataatccacgggaatttccatcgtcggatcgtcgctgcggcagcccaaaatggaaatcagctccagcttgcggcgcacgaagtggccgtaataatggaagacgtagttggttagccaaggctccagcccgcaaatgcctgaactgtagttatccctgataatgtacttagccccggccagtacggcgctgatgatgtcataaggcaggtgagagtgcaggatcagcgccaaatccggctgatgttcgcgcagcgatttcagcaacgggcgcatcgtcttgatcttgctgtcccaatacaccacgcgatcgtaatagcggccgttttccaccagctcgcggtttttcttgtgcaccaccagcgtgatgtgcgcgttggggtagcgttcccgcatcgcccgcagtgccggcgtgttgaacatgaagtcgcccaacgccgtggtggaatagatgacgatattgtcaaactgctgggcgccgtcgaacgtcgccttgtcctgaaaacggccgtacttcgccgtatagcgccgcaagaaccagtcggcaaccttgattttccatttcttcgacatgtgcgtgcttaattcgctttaagttgataatactcggccagcgtcatgcccaccgtgcgctgctgcagccagtcaaacagctgctccagatcgcggtacagcccttcgatatcctgctcggttttgaacgtcgggctgccgcccggcataaactcggaggagtgcagcatgaattcgacgtagtcatgcccctgcgccagcgatgtctcagccacgcttatcatcttggccacattgccgccactcggccgcagccagttgacggacggcgaacgccgcttgccgcgcagccggtcatagccctgcttgaaggcattcatcagcgccgagtgcttgtactggatactcatcggcacttccagcaacgacgaagcgcccggtttggcgatgttctgcggatcgatgaaataggcctgcgacgggaaccgactataatctgtgccgccgttgccctgtggattgcccggcgaaaactgccagttgacccgcggcgtcaccgaacagtccacctgatagccgtattccagcagcagcgaggcataatattcgttgaacgcccaacggccggcgcgatgactgagcattttggtctggaaggcatcttccagcagcttggtcatgtgatcgaccttggcgcggatctgatcggcgggatactcgatcaaataaggcttgtggcgccagtcgtcgtcggtgagcggcgtcagcggcgggctgttccaggcatgcaggtgcatgcccacttcacccgtgccgcgagcgatcacgtcgcgcgcgaactcgacataagccgggtccaccgccatttcatagttggtgagataaaccggtttgaaggcgtatttttcgcacaatgcctgaaagcgcggcaagaaacgcgtgttttcggtcgcgatgcgatcgtggttttgccacagattatcgccttcggtatcaatggtgatgagaaacgccggtttagtcatgaatatcgagcctgatatcaacagaatgcactatgttacgcaggccgtttcgccagggcaaacgactttgctgcctggtttggacaacgttgaagcgtattcgtccccggctcggcgatttttttacggccaggcaagaaaaccttgcaacagtagccacatgcgatcgtgtcatttagaatcaaagattggtttcccagaaagcgactcatgatgaacgacgcgccagccccaacttccgccccatccgtacagcgtattctgatcataaaactgcgccatcacggcgatatgctgctggtcacgccggtcatcagcagcctgcggcaaaactacccgcaggcgcagatcgatgtgctgctgtatcaggaaacgcaggagatgctggccagtaatccggaactatcgacgctgttcgccatcgaccgtcaatggaaaaaacagggcgcccgcgcgcacctggggcacgaactggcgctgctgcgtcgcctgaaggcgcaacgctacgatctggtggtcaacctggccgatcagtggcgcagcgccatcctcacgcgcctgaccggtgcgcgtatccgtctgggcttcgatttccccaaacgccgcggcttgctgtggcgccattgccacacccagctggtgccggtcgacaatcacgcccacctgcataccgtcgaacagaatctttcgctgctggcgccgctgaacctgcccgcgctcaatgaacatgtgaccatgagttacgatccgcaggattggcaggcttgtgagcaacggttgcagaagcagggcgtcttcggcagttatattgtggtgcaacccacctcgcgctggttcttcaaatgctggagcgaagagaaaatggccgccaccctcaccgccttgcaggccgacggccaccagctggtgatcacctccggccccgacgccagagaacaagccatggtagaacgcattttggcgctctgcccgccacagggcgtgatctcgttggccggccagctgacgctgcgccaactggccgccctgatcgaccacgccaagctgtttatcggggtggattcggtgccgatgcacatggccgccgcgctgcaaacgccgtgcgtggcgctgttcggcccttccaagctgactttctggcggccgtggcaagctaccggcgccgtgatctgggccggcgacttcggcgaactgcccgatccggacgccatcgataccggcaccgacgaacggtatctcgaccttattcctacagacgcggtgattgcagccgcgcggagcacgctggcatgaaagcatttcgtttggcgatcgttcgccaaaaatatcgcccggacggcggagccgaacgtttcgtttcccgcgccctggaagcgctggagcaacaggatctcgatctgaacgtcatcactcgcgaatggcagggcgacgccaatcccaactggcatatccacctgtgtaacccgttaaagctcggccgcatcagccgcgagcgaggcttcgccgtggcagccagggcgctgtggcagaaagagcgcttcgatctggtgcaaagccacgagcgcattcccggctgcgacatctatcgcgccggcgacggcgtacaccgccgctggctgctgcaacgcgcgcgtctgctgccggaatggcgccgcaagtggctgttctccaatcgctatcaccgctatgtgatgtgcgccgaacgcgccatgtacgccgcgcccgagctgaaagccgtcatctgcaacgccgagatgatcaagcaggaaatcatcgccgactttggcgtgcccgccgacaagatcacggtgatctataacgccatcgacaatcaaaagttcccgcccgccgacgaggccctgcgtcaacgtctgcgcgagcaatatcagatcccgcaacaggcgcactgcctgatcttcgtcggctccggtttcgagcgcaaagggctggccgccgccatccgcgccgtggcggcgaccgacagccacctcctggtgatcggtaaagacaaagccgaaaaacgctaccgggcgctggcgcagtcgctgggctgcggcgatcgcattcactttatgggcgtgcagaagcagaccctgccgttctatcaggccgcggacgcgctgctgctgccgacgctgtacgatccgttcccgaatgtgattctagaagcgatgtcgtgcggcctgccggttatcaccagcaccacctgcggcggcgccgagtttatcaccccaggccagaacggcttcgtgaccgacgcgctcgacgtaccagccatcacggaggctattcgggcactgccgcgccaggcgctgggatcatccatgggcgaagcggcaagattgcgcattatgacggctacgccggcgcatctgtccgaacagctgatttccctctataaccggttactggattagctatgcgtattctgatgatcatcgatggcctgccgggaggcggcgcggaaaaagtggtgctgaccctgtgtcagggcatgcagcaacaggggcacgacgtcagtctgatctcgctgcgcgacgtctgcaattaccctattccaccgggcattgattatcaggtggtggccgatcgcagccgtgccccctggcgcaagctgaccgagctgtcgcgccgcgccgccgcgctggatcgcgcgatagccgaacacgagcgccaacacggcgcgttcgatctggtgttctccaacctgcataaaaccgatcgcatcgtcagccgcagcaagcggttggccgcggatcgcctgtggttctgcattcacggcattctctccacgtcctacctcggccaccgcaagggtctggaccgctggctgaagcaacgcaaaatcgccaacgtttaccagggaagaaatatcgtcgccgtttcacaggcggtcggcgacgatctgcagcagaatttgccgatccgcccgcgccggttggcggtcatcaacaacccgttcgacatcgacgccattcagcaacaggcggcggcgccttgcgaactggccggccaggactatctggtgcacgtcggtcgctttcacaccaccaagcggcatgaccgcctgctgaaagcctatgcgctctccggcattcaggcaccgctggccttgatcgggtccggtgacgacgccaaagtcgacgaggtcaaacgtctggcgacaaacttgggcatcgcagagcgcgtgttgttcctcggtttccagagcaatccctatccgtttatccgccatgcctcgctgctggtgctcagctccgacagcgaagggtttggcaacgtactggtagaatcgctgctgtgcggcacaccggtggtcagcactcgctgcccgggcggccctgcggaaattctggaaaaagccggcatggctaacgcgctggcggaattaaacgaagcgtcgctggcagaaaaaatggcggaggtttacgccaacccgccgcagataaatcaacagcaattgctgagctatgggcttgagcctatttgccatcaatatattgagctgaaagaagaacaataaaaaaataaataaggcaggggatgcctgccttattttcttcgttagttgagcgcctgcattttctgccaaacctcatcgacagaaacatcttcacagtgccccgattcactttgcaaaatatgatggcggccagtccatggatgccaggacactttatcggtatcgccaaagaacaccaccatgtccttattcaacgcagcagcaagatgcatctgcccaccgtcgctgcacagcacccggtcgcataaatcaaacccgcccaacagctcacgcaccgacgccgtcggataaagcgcgacgcgttcgttttgacacagcgccagcagctgttcggcgcgcagctgatcgccgatgtcgtccggtgccaacgtgccctgaggcgaccaaaagatcagcacgccggtgtggggatcggcaaccagacggttgatgatttcggcatagcgctcaaccggccaacgccgtttcgggctgcggctgctgatgtgcacggcgcatacgcgctcgaccggcggcagacgttcctgccgccgctgtgccgccaattgccgctcttcaggcgccagaaacacccgcaccggcgggatcggaatggattgatcggttatcgccgataaatagctgtaggtgtgttcgacctgatggaggccgcggaaatcgtccttgcggaacgggcgatgaatatctttcgtgcccagatcggcgccgatgatatgggtggcgccggccattttcgctagacgcaggctgtatttgcaaggcaccgggttggccagaataaccgcatcgaactttattttgcgcagcttcaggaagatcatcatgcgttcgaaataaacgcccaacgtggtctcatttttcgccttgtgcttggcctttttatagacaaagactttctcgagatgaggattgtttttaacaacatcctggctgactttattgatcagcagataaacttttgcgtccggataggcaattttcaccccctcaatcaagggcgtggtgcaaacaagatcgccgatgttatcgcggcgaataattaaaatattcttcattccgagcctgtcggcgaaatcgctcgccggttgtctgaaactgacacccaaggttaccaaattagcgcctttcccttccagttatggtactattccgaataacccatataaatgaaattgatagaatgttgctgcgtttatatcaggtactactctacctcatccaacccctgatctggctccgcttactgctgcgcagccgcaaagctccagcctaccgtaaacgctgggcggaacgctatggcttctgcgccgggaaagtcgtgccaggcggcatcatgctgcattccgtctccgtcggcgaaacgctggcggccatcccgctggtgcgggcgctgcgccatcgttaccccgctttgccgataactgtgaccacaatgaccccgacaggttcagaacgcgtccagtccgctttcggcaaagacgtgcatcatgtctatctgccctacgatctgcccggcgccatgaaccgcttcctcgaccaggtgaatcccaagctggtgatcatcatggaaaccgagctatggcctaacctgatcaacgcgctgcatcagcggcaaatccccctggtgatcgccaatgcacgcctgtcggcccgctccgccgccggctataagaaaattggcggattcatgcgcgatatgctgcgccgcatcacgctgatcgccgcacagaaccaggaagatggcgatcggtttatcgaactgggcctgaaacgctctcagctggccgtcaccggcagcctgaaattcgatatctccgtcaccccggagctggccgcccgcgccgttacattgcgccgccaatgggcgccgcgccgcccggtgtggatcgccaccagcacccacgacggtgaagagaccatcctgctggaagcgcaccgcaaactgctggaaaaacaccctgacctgctgctgatcctggtaccgcgtcacccggaacgcttcccgaccgccaaagagctggtgcagaaggccggcttcagttacaccctgcgcagcagtggcgaaatcccgtccggcagcacccaggtggtgatcggcgataccatgggcgaactgatgctgctgtacggcatcgccgatctggcctttgtcggcggcagcctggtggaacgcggcgggcacaacccgctggaagccgccgcgcacgccatcccggtgttgatgggcccgcatactttcaactttaaagacatctgcgccaagctttcgcaggccgaaggcctgatcaccgtgaccgacgtggattcgctggtgaaggaagtggcaaccctgctgaccgacgaagactaccgccgttactacggccgtcatgcggtggaagtgctgtatcagaatcagggagcgttgcagcgcctgctgcagctgctggaaccgcacctgccgccccggagtcactgaatgagcagccgcaaaagcctgtcggtggtgatgatcgccaaaaacgaagccgggctgttgccggactgtctgcgctcggtcgagtgggccgatgaaatcatcgtgctggactccggcagcgaagacgacagcgtcgccgtcgccgaaagcctgggcgccaaagtcttcacccacaccgactggcaagggtttggcaagcagcgtcagctggcgcaaagctacgccagccatgactacgttttgatgatcgacgccgacgaacgcgtcacgcccgagctgcggcaatctatcgaacaggtgttgaacgcgccggacgacggcgccgtctacagctgcgcgcgccgcaacctgttccttggccgcttcatgcgccacagcggctggtatcccgaccgcgtcaaccgcctgtacgccaaccaacgctatcgctataacgacgatctggtgcacgaatcgctgaacatcggcggcgccaaagtcatccctctcagcggcgatatgctgcacctgacctgccgcgatttcttcgccttccagcgtaaacagctgcgctatgccgaagagtgggccacccagcgccaccgggccggcaagcgctgcggctacctgtccatcctgacccacacgctcggcgccttcgtcaaaacctggctgctgcgcgccggcttcctggacggtaaacaggggttgctgttagcggtggtcaacgcgcaatataccttcaataaatatgccgcattatgggcattgggccgcaactactcagagaagtgaatcatgaccagcaaagccatctatcccgggaccttcgatcccatgaccaacggccacctggatttagtgacgcgcgcatcactgatgttcgatcacgtgattctggccatcgccgccagcccgagcaaaaaaccgctgttcagcctggatgagcgcgtggcgttggcgacgcaggtcacctcgcatctggacaatgtggaagtgctgggcttcagtgagctgatggcgcacttcgccgcccaccagaacgccaatatcctggtgcgcgggctgcgtgcggtgtctgactttgaatacgaattgcagctggcgaacatgaaccgtcacttgatgccaacgctggaaagcgtatttctgatgccttccgaagagtggtcgttcatctcctcctcactggtgaaggaggtcgcccgccacggcggcgatatcgcgcctttcctgcccgatgtggtcacccaggcgctgatggcgaaactcgccgccgagtgatgctcagcgctggcagcggcggcaaaagaaggtgctgcgctgcccgtgcttggcggattcaatcggcgtgccgcatgcgcggcacggttctcccgcccgcccgtaaacctgcagctcctgcgcgaaataccccggtttgccgtccgactgcaaaaagtcgcgcaatgtcgtgccgccctgctcgatagagcgctgcaacaccgccttgatggtcttcgtcagcagttccgcttcggctttgctcaaggatcccgccggacgatcgggcaggatcccggcgctgaacagcgattcgctggcgtaaatgttaccaacgccgaccaccaacttgttatccatcagccacggtttgatcagcgtgcgcttattgcgtgatttttcatacaggtagtcgccgttgaacgcttcgctcagcggttccggccccagatgcgccaacacgctgctggtcgccaggtcttcgcaccacagccaggcgccgaaacggcgcggatcggtatagcgcaggatcatgccgttgctgatcaccagatcgacgtggtcgtgtttgccggcttcgtcttcgttttcctcgcgcagcatgcgcaggctgcccgacatgcccaggtgcacgataatccaaccgttctccagctcgatcagcaggtatttggcccggcgctgcacgctgagcaccggccgatcgctcagcgtcaggatctgctcggaaaccggccagcgcaggcgcgcattgcgcaccaccgcatactgaatgctgtggccgacaagataaggctctataccgcgtctgctcgtctcaacttccggtaattcaggcatctggcttcccctccgacgttttctaccctttataaaacaaaaaacccggccaaggccgggtttttcattaatccactaaaattatttaattttagcttctttgtatactacgtgctgacggacaactggatcgaatttcttcagttccaatttttccggcttagtacgcttgttcttcgtggtggtatagaagtgaccagtaccagcagaagaaaccagcttgatcttctcgcgaacacctttagccatgattcagttccttaatacttctcaccacgggcacgcagatcggccagaaccgtctcaatacccttcttatcgataacacgcatacctttagcagatacacgcagagttacaaagcgcttctcagcctcaacccaaaaacggtgtgagtgcaggttaggcagaaaacggcgtttggtcgcgttcattgcgtgggaacggttgttaccgctcaccgggcgcttgccagtaacttggcagactcgggacatgtctattctccaaaaatcaaatcagctcgagcttcgtatagggtatggccgcctcgtcaggcttttagagcccatctcagcaaacttcatactgaggagactctcgtcatcaggtagaaaccacacatcaggtcagaaacctgctgagataggctcttgcgccaaacccaagattctcaaaggtggcgtagtatacgctctgaagcgtaagtgctcaagtcccgaacagctaaagatcccacaaggatcgcgaaaaaatcgcttaaagccatccgcgctcggcaaaagagacgcattcaccccgaccgatcaccaaatgatcaagcactcggatctccaataactgacaggctttcaccacctgttccgttattaaacggtcggcatgactgggttcagccttacccgaagggtgattatgcgcgagaatcagcgcggcggcattagccttcaacgcttcgcgcacaatttctctcgggtagacgacgacgctgctgatggtaccagcaaacatctcctgatggcgaataacccgatgctgattgtctaaaaacaataccaaaaagacctctcgctcgcgatgcgccagcaggctttgcagataatgctgggtaacgcgcgggttgagcatggcattttcctgcgacaagtggctggaaaagaagcgcagcgccagctcggcaatcgcctgcagttgggtatagctggcgtcgcccaggcctttttggctgcaaaaagcctgatgatcggccgacatcaggtgataaagcgagccgaatcggcgcagcagttgctccgccagctgcatcacgtgcacgccgggcaatccggtgcgcaagaaaatggccaacagctctgcgtcggacaacgacgccgccccttgcatcaacagcttttcacgcggcgccaacgcgcccggccagcacgccacaatcgggttgctcatcgtgttcctccctgaaagggctacagcatgccatgcgccacccgacgcgttcgacaggtgtttgataacattgcgaagtgtttcgcaaagcacaatgtaacgccctgcagccattgcggaatcgctcacctgaacggcggatatgctaaaatggcgcatctttcggctttcaatcggacaatgatgatgacgggactttccggcaaacatattgtgcttggcatcagcggcggcatcgccgcctacaaatgcccagagctggtgcgccgcctgcgcgacaggggcgcggaagtgcgcgtggtgatgacccacgccaccaaggcgttcattacgccgctgacgctgcaggccgtttccggctatccggtgtccgacgatctgttggatcccgccgccgaagccgccatgggccacatcgagctcggcaaatgggcggatctggtgattctggcgccggcgaccgccgatctgctggcgcgcgtcgccgccggcatggccaacgatctgctgaccaccgtctgcctggcgaccgacgcccctatcgccgccgcgcccgccatgaaccagcagatgtatcgcgccgccgccacgcaggccaacctgcaaacgctgcaggcgcgcggcatgctgctctgggggcctgacagcggcagccaggcctgcggcgacgtcggcccgggccgcatgctggatccgctggacatcgtcgagctggcgaacggccatttctctgtcacgcaggatctgcaacatttgcaggttatgatcaccgccggcccgacgcgtgaagcgctggatccggtacgtttcatcagcaatcacagctccggcaaaatgggcttcgccattgcccgcgcagccgccgctcgcggcgcgcaggtgacgctgatcgccgggccggtcaatttgccgacgccgccatcagtcacccgagtcgacgttaccagcgcactggagatggagcaggcggtgcaacaacgcgccgcgcagcagcagattttcatctcctgcgccgccgtggccgactatcgccccgagcggatcgccgatgaaaaaataaaaaaacagggtgatgaaatcgtcctcaagatggtaaaaaaccccgatatcgtcgccggcgtggcggcgatgaccaaaaatcgaccgtttgtcgtggggtttgccgccgaaacccagaatgtggaagaatacgcgcggcaaaaactggcgcgtaagaagctggatttgatttgcgctaacgatgtatcgcttgcagagcacgggttcaacagcgacaccaatgccctgcaccttttttggcaggatggagaaaagcgcctggcgctgagcgacaaggcactccttggccaacgtttaatagacgagatagtcagccgttatgatgaaaaaaatcgacgttaagatcctcgacccacgcatcggtcaggatttcccgctaccgacctacgctacgccgggctctgccggtctcgacctgcgcgcctgtctggacagcgcggtagagctggcgccgggtgaaaccacgctgctgcctaccggcctcgcgatccacatcgccgacgccagcctggcggcggtgatcctgccgcgctcaggcctgggccataagcacggcgtcgtgctgggcaatctggtcggcctgatcgactccgattaccagggccagctgatggtgtccgtgtggaaccgcggccagaagcacttcaccatcgagccgggcgaacgtatcgcgcagatggtcttcgtgccggtggtgcaggccgaattcaacctggtggaagagttcgacagcagcgaacgcggcgaaggcggcttcggccactcggggcgccactaagcgccacccaatgcacgatgaccggcagggaaacgtcgcctgaaccttgcctttccggggagaaggatgtctctgcggcaaggttttaccgcgacaattgcagcgcacaccaggcagcgcggaaaaaggccgttaaggccgctgaccccagcatcgtaaaaaagctatcacataagccgcacagagcctgctctgcagcggccggtgcgcgggtttccgtcagttaagttttagcaagggtctaatcagacatggcagaaaaagaaaagacgaaaaggaatcggcgcgaggaaatattgcaggcgttagcccagatgctggaatccagcgacggcagccaacgcatcaccaccgccaagctcgccgcgaacgtgggtgtttctgaagctgcgctgtaccggcatttccccagcaagacacggatgttcgacagtctgatcgagtttatcgaagacagcctgatcacccgcatcaacctgatcttgcaggacgagaaagagacgtttaatcgtctgcgcctgattttgctgctgattctgggctttgcggagcgcaacccagggctgacgcgcatcatgaccggccacgcgctgatgtttgaacaggatcgcctgcagggccgcatcaaccagctgttcgagcgcatcgaggcgcagctgcgtcaggtgctgaaagagcgcaaattgcgcgaaggcaaaggctttatcgtcgatgaaacgctgctggccagccaactgctggccttctgcgaaggcatgttgtcgcgctatgtgcgttcggaattccgctatcgccccacgcaggaattcgacgcccgctggccgctattagcggcacagctgcaataacgaaaacgccgggcatgcccggcgttgttatttataccccgtactgctcgcggtaagcgcgcaccgccgccaggtggtccgccatctccggtttctcttccaggtaggcaatcaggtctttcagcgtcacgatcgaaatcaccttgcagtgatagtcgcgttccacttcctgaatggcggagatatccgcgcggccgcgttcctgacggtcgagggagatcagcacacccgccagcgaagcgccgctggcgccgatgatttccatcgactcgcggatcgcggtgccggcggtgatcacatcgtccaccagcatcacgcgcccctgcagcgggctgcccaccagcgaaccgccttcgccatgggttttggcttccttgcggttaaagcagtaaggcacgtcgcgctcatggtgttccgccagcgccaccgccgtggtggtggcgataggaatgcctttataggccgggccaaacagcagatcgaaatcgatgccggaatccatcagggcttcggcgtagaagcgccccaacagcgcaagatcgcgcccggtattaaacaggccggcgttgaagaaatacgggctggtgcggccggatttcagggtgaactcgccgaacttcaatacctgcttgttaagcgcgaactcgataaactggcgctgataggctttcattactgcttctcctcgtctgaatctgcttgggtcttgtcattactaccgcccgatcgccgggcataaaaaaggcgacttctcagtcgccttgaaaaatcagtccaccagcgccgctttctgcgcctggaagatggtttcgatgccccctcgggccagcgccaatagcgccaacagctcatcgtggctgaacggctcgccttcggcggtgccctgcacttcaatcatgcggccgtcttccatcatcaccacgttcatatcggtttccgcggcggaatcttccacatactccagatcgcacagcgcttcgccattgacgatgccgacggaaaccgccgccaccatccccttcatcgggttggctttcagcttgccgttagccaccagggtgttcagcgcatcggccagcgccacgcaggcgccggagatggaggcagtgcgggtaccgccgtcggcctgcagtacgtcgcagtcgagggtgatggtgaattcaccgagctttttcagatccaccgcggcacgcagcgagcgggcgatcagacgctggatctccagcgtgcggccgccctgcttgcctttggcggcttcacgggcgttgcggctgtgggtggagcgcggcagcataccgtactcggcggtgatccaaccttgcccctggcctttcaggaagcgcggaacgccctcttctaccgtggcggtgcacaagactttggtatcgccaaactcaaccagcactgaaccttcagcgtgtttggtatagtgacgagtcagtgtcagggggcgaacttgctgtggtgctctgcctgcaggacgcatgggctctctccggcttcaaatcaactattggctgcgcattatacgggcttcgtgacgtaatgcctatcctgcccgcagccgcgacgctataatcgccccatcttttcctattacgggtacgcatcaatgatccgcagcatgaccgcctacgcccggcgtgaaatcaagggtgaatggggcagcgcagcctgggagctgcgttccgttaaccagcgctacttagaaacctacatccgcctgccggaacaattccgcagcctggagccggtgatccgtgaacgtatccgtggccgcctgacccgcggcaaagtcgaatgcaacctgcgtttcgaactggatccaagcgcgcaaagctcgctgatcctgaacgaaaaactggccaaacagctggtcgaagccgccaactgggtgaaaatgcagagcgacgaaggggaaatcaacccgatcgacgtgctgcgctggccgggcgtaatgtccgcgcaggagcaggatctggacgccatcagcgccgagctgatgcaggcgctggacggcgcgctggatgactttatcgtcgcacgcgaaagcgaaggcgccgcgctgaaaacgctgatcgaacagcgcctcgacggcgtcagcgccgaagtggtcaaagtgcgcgcccagatgccgaacatcctgcaatggcagcgcgagcgcctggtcagcaagctggaagaggcgcaggtgcagctggaaaacacccgcctggagcaggagctggtgctgatggcgcagcgcatcgacgtcgccgaagagctggaccgcctggaagcgcacgtgaaagagacgcacaacatcctgaagaagaaagaagccgtcggccgccgcctcgactttatgatgcaggagttcaaccgcgaatcgaacaccctggcctccaagtcgatcaatgccgacgtcaccgcctccgccatcgagctgaaggtgttgatcgaacagatgcgcgagcagatccagaacattgagtgatcccgctccgcacgccatcaagcccgcgccacgcgggcttttttatggttgcagatcagcgataggcggccgcctgctcctcaccgatcaaccccattttctgcagctgcaccgcaatgctccaggttgagcgctcgaactcatcgctcagcgcctccagcgtcgccccggccgcatggctctcgcgcagccgcagtttttcttcttccggccaggggaagtaagcattggccggccggccctcggccagattcttctgctgcttttcttccggcgtcagcctggcttttttctgcagttcggattcaccgtcgaactcgttggccaatgcaaacagcaggcggatagcctccggcgcgcaggccgctgaagccggtctcaacagctcgccggtgtcgggattaacgccgttggccagcgccctgagcaacgtgccggtattcatcgttcgcctccttgttcgataaaatgcgtgccgatcgcgaccggcgccttgtccaaacatgtttctcttcctcagccaagaaagccacgctttgcgccatgaaaaatcgcccattgcgagccagattccaggcgcctgaacgtgcgggacggtggttgcatcaggctgcgagccggcaggcatcatggaagacggctcactaaggcacttcgggggcttatgaaaaactgccgagcagcgcgtgtggatgacatttggcaagatatcccgcacgccataagtattttgttctaattatcacgcaaggtaatgaaaggacggcgatgctgtggctaaatgtgtttttttcctgcccgtgaaccgtacggaccgtttatgccacaaattctgcaatttattatggccttggtggtgatcatcgccctggcgctgctggtcagcaataatcgcaagaaaatccgcctgcgctatatcatccagctgttggtgatcgaaggcgcgctggcctacttcttcctgcactccgccagcgggctcagcgtgatcaaacacgtcgccggcttcttcgacaccctgctcgcctacgccgcccaaggatcggagttcgtattcggcggcatgagtaaggatggcctggcgtttatcttcctcggcgttttgtgccctatcatctttatttccgccctgatcggcattttgcagcatttccgcatcctgccgctgatcatccgcctggtgggcaccctgctgtccaaggtcaacggcatgggcaaactggaatcgttcaacgccgtcagcacgctggtgctggggcagtcagagaacttcatcgcctacaagggcatcatcggcgacatctcgccgcgccgcatgtacaccatggccgcgaccgccatgtcgacggtatcgctctccatcgtcggcgcctacatgtcgatgatcgacgcgcagtacgtggtggcggccttgatccttaatatgttcagcaccttcatcatcctgtcgatcatcaacccgtatcaggttgaagacgagccggagctgaagctgaacaagctgcacgaagatcagagcttcttcgaaatgttgggcgagtacattctggccggcttcaagattgcgatgatcatcgcggcgatgctgattggctttatcgcgctgatctccgccgtcaacgcgttgttctcggcggtgctcggcatcagcttccagcagatcctcggctacgtgttctatccgctggcctggctgatcggcatcccggcggaggaggccctgaaggcgggcagcatcatggcgaccaaactggtggccaacgaattcgtggcgatgattgaactgaagaagatcgcggcggagctgtcgccgcgcgggctgggcattttgtcggtgttcctggtgtcgttcgccaacttcgcctccatcggcatcgtcgccggcgccatcaaaggactgaacgagcagcaaggcaacgtggtttcccgttttggcctgaagctggtttacggctcgacgctggtgagcctgttgtcggcagccatcgccggcctggtgctgtaatcctcactcccggccaggcggccgggagtgcgttttaaaacgccacgcacaccggcgcatccacccgcatcaccgaatcctgcgcaaactgctgcttatagccgctgcgcagcgcctcgatattcgcctcgctctctttgcccggcgcatggatcagcagcagcgccttgctgttctcgcgcgccagtttgccgtcgtggcccagccactgccctttggcatcaaacaccgtcagcccgtctttaaaacgtggtgtcacctggctatcgacgaaggtttgccactcggcggcggtgatcgccggccccgccggccggttcaggccgaagtagagcgttgtctgcactagcggatcgccggtgcggcaagccggggtgggggaaacagcctggtggcctggcgccacgcagccgctcagcagcagggctgccatcatggcgccagcagccagtctcggggagtttttcatctgcagtctcggtttctcggttgaaggattcgctgcaaaaatcatagtcagcgatggaaattagcgcgaaatttctaatgctttcattaacagccagatgttaaaaaaggctggttatcggcaataaaaacggagtttggattagctatattaatccgaaatgccatcggtgaaaaaaactcagtggcgcgcgtcctcggcggcgattaccctgccggccatcattctgacgcaagtacgctgtgaatcccttatgttactgagcatcctttatatcatcggcatcaccgccgaagccatgaccggcgcgttggcggccggccgccgccaaatggacatgttcggcgtgatcatcatcgcctcggtcaccgcgatcggcggcgggtcggtgcgcgatatgttgctcgggcattttccattgggctgggtcaaacacccggaatacatcgtcatcgtcgcaatagcggcgatcgtcaccacctgggtggctcctctgatgcgccatctgcgccgcctgttcctggtgctcgacgccgtcggcctgatcgtcttctcgatcatcggcgcccaggtggcgctggatatggggcacagcgcgattatcgccgccatcgccgcggtgatcaccggcgtcttcggcggggtgctgcgcgacatgttctgcaaccgcatcccgctggtgttccagaaagagatctacgccggcatctccttcagcgccgcctggctgtatatcggcctgcagcacctcagcctgccgcacaatctggtggtgatcctcaccttggtcgccggcctgagcgcgcgtcttatcgccctgcgcttccgcctcggcctgccggtgttcaactaccagcatccggatcactgatcccggggcggcaacgcgccgccgccgaggccaaaactgcaaaaatgtcgcccttcgacgcgcaaattcgccctttcgacgctttttccacgcaaagccgcgggcaaaatgcgagctaacgctgcacccggcgcgttagccgtgtatactgtgcggagaaaatacacatccgctgtttttggcatatcaaccgttatcaacgaacatcatcatggctcaaggcacgctttatattgtctctgctcccagtggcgcaggtaaatcaagtctgattcaggctttgttaaagacgcaaccgctgtacgacacgcaggtttcggtttcgcacaccacgcgcgacagccgcccgggtgaaaatcacggcgagcactatttcttcgtctcgaaagacgaattccgccggatgatcgagcaggatgcgtttcttgagcacgccgaagtgttcggcaactattacggcacctcacgcgccgccatcgaacaagtgttggcgaccggcgtagacgtgtttctggatatcgactggcagggcgcgcagcaaatccgcgccaaaatgccgcaggcgcgcagcatcttcattctgccgccgtcgaaggaagaactgggccgccgcctgcgcgggcgcgggcaggactccgaagaggtgatcgccaaacgcatggcccaggccgtggcggaaatgacgcattacgcggagtacgattacctgatcgtgaacgatgatttcgatctggcgctgtccgatctgaagaccatcattcgcgccgaacgcctgcgtttgggccgccagttgctgcggcatgacgctttaatcagcaaactattggcagactgaaggcagtttcagtatcatgcccagtcttttcgtcacctgtggagtagcacaaatatggcacgcgtaactgttcaagacgctgtagagaaaattggtaaccgttttgacctggtgttggtcgctgctcgtcgggcgcgtcagatccagaccggcggcaaagatgcactggttccggaagagaacgacaagtacaccgttatcgccctgcgcgaaatcgaagaaggcctgatcaccagccagatcctcgacgtgcgtgagcgccaggaacagcaagagcaggaagccgcagagattcaagcggttaccgcgattgctgaaggtcgtcgttaattagacagcgagtccgccttgtacctgtttgaaagcctgaatctgctgattcaacgttacctgcccgaggagcagattaagcgcctcaaacaggcatacctcgtcgcgcgcgacgcgcacgagggccagacacgctccagcggtgagccctacattactcacccggtcgccgtggcctgcatcctggcggaaatgcgtctcgaccacgagacgctgatggcggcgttgctgcacgacgtcatcgaagacaccccggccacctatcaagatatggaacagctgttcggcaagagcgtcgccgaactggtcgagggcgtctccaagctcgacaagctgaagttccaggacaagaaagaagcgcaggcggaaaacttccgtaagatgatcatggcgatggtgcaggatatccgcgtcgtgctgatcaagctggccgaccgtacgcacaacatgcgcaccctcggttcgctgcgccccgacaaacgccggcgcatcgcgcgtgaaaccctggaaatctatagccccctcgcccaccgtctgggtattcatcacctgaaaaccgagctggaagagctgggcttcgaggcgctgtacccaaaccgctaccgcgtgatcaaggaagtggtgaaagccgcgcgcggcaaccgcaaagagatgattcaaaaaatcctctccgagatcgaagggcggctgaccgaggccggcatcgcctgccgcgtcagcggaagggaaaaacacctttactccatctacctcaagatgcacctgaaagaacagcgtttccattccatcatggatatctacgcgttccgggtgatcgtcaaagaggtcgatacctgctaccgcgtgctcggccaggtgcacagcctgtataaaccgcgtccggggcgggtgaaagattacatcgccattcccaaggccaacggctatcaatcgctgcatacctcgctgatcggcccgcacggcgtgccggtcgaagtgcagatccgcaccgaagacatggatcagatggctgagatgggggtggccgcgcactgggcttacaaggaaagagaacagggcgaaaccggcaccacggcgcagatccgcgcccagcgctggatgcaaagcctgctggagctgcagcaaagcgccggcagctcgtttgaatttatcgagagcgtcaaatccgatctgttcccggatgagatttacgttttcaccccggaaggccgcatcgtcgagctgcccgccggcgccacgccggtcgacttcgcctatgcggtgcataccgatatcggccatgcctgcgtcggcgcgcgcgtcgatcgtcagccgtacccgctgtcgcagtcgctgaccagcggccagaccgtcgagatcatcaccgcgccgggcgcacggcccaacgccgcctggctgaacttcgtggtcagctcgaaagcgcgcgccaagattcgccagatgttgaagaacctcaagcgcgacgactccgtcggcctcggccgccgtctgctcaaccatgcgctgggcggcagccgcaaactggccgaaatcccgcaggaaaatattcagcacgagctggatcgcatgaagctggcgacgctggacgatctgctggcggaaatcggcctcggcaacgccatgagcgtagtagtggcgaagaacctgcagggcgatcagtccagcctgggcaccacctccggcgtgcgcaacctggccatcaagggcgccgacggcgtgttgatcaccttcgccaagtgctgccgtccgattccgggcgacccgattatcgctcacgtcagcccgggcaaagggctggtgatccaccatgaatcctgccgcaatattcgcggctatcagaaagagcctgagaagttcatggcggtcgagtgggataaagagaccgagcaggagttcatcgccgagatcaaggtggatatgtttaaccaccagggcgcgctggccaacctgacggcggcgatcaacgcggccgagtccaatattcagagcctgaacaccgaagagaaagacggtcgggtttatagcgcctttatccgcttgaccacccgcgatcgcatccatttggcaaacattatgcgtaaaatccgtatcatgccggatgtgatcaaagttaaccgcaaccgaaactagcgcttatgagtcctgaacgctatgcgcggatttgtgaaatgctcgcgacccggcagccggatttgacggtctgcctggagcaggtgcacaagccgcataacgtctccgccattatccgcaccgccgacgccgtcggcgtgcatcaggtccacgccgtgtggcccaccacccgcatgcgcaccctggtctcctccgccgccggcagcaacagttgggtcagcgttaaaacccatcgcaccattggcgacgcggtcggtcacctgaaagcgcagggcatgcaaattctggccaccaacctgtctgcgcgcgcggtcgatttccgcgaggtggactacacccggccaacctgcgtgctgctcggccaggaaaaaaccggcatcaccgaagaagcgctggcgctcgccgatcaagacatcgtcattccgatgatcggcatggtgcaatcgctcaacgtctccgtcgcttcggcgctgatcctgtatgaggcgcagcgccagcggcaaaacgccggcctgtaccgccgcgacaacagtatgctggacgaagaagagcagcagcgtctgctgttcgaaggcggctatccggtgctggccaacgtggccaagcgcaaagggctgccgcgcccgcagatcgatgaacagggccaggtggtcgccagcgccgaatggtgggcggccatgcaggcgacggtgcgcaaatgaaaggccgcctgctggatgctgtcccactcaccacgctttccggggttggcgccagccaggcgggcaaattggccaagcttggcctcgacaccattcaggatctgctgctacacctgccgctgcgctacgaagaccgcacccgcctctatccgatcaacgatctgctgccgggcatctacgccacggtagagggggaagtgctgcgcagcgacatcagtttcggccgccgccgcatgctaacctgccagatcagcgacggcaccggcatcctcaccatgcggttcttcaacttcaacgccgcgatgaaaaacagcctggccaccggccgccgcgtgaccgcctacggcgagatcaaacgcggcaaccacggcgcggagatcatccatccggaataccgcattcagggcgaagccagcgaagtcgagctgcaggagtcgctgacgccggtttaccccaccaccgagggggtgcggcaagccacgctgcgcaagctgaccgatcaggcgctggcgctgctggatacctgcgccatcgccgaactgctgccgccggagctgagcggcggcctgatgagcctgccgcaggcgctgcacaccctgcaccgcccgccgccggacatccagctggcggatctggagctgggcaaacacccggcgcaaaaacgcctgatcctcgaagagctgttggcgcataacctcagcatgctggcggtgcgcgccggcgcccagagttaccaggcgcagccgctgctgccggacgatcggttgaaaaaccgttttctcgcccagctgccgttctcgccgaccggcgcgcaaacgcgcgtggtggccgacatcgaagccgatatgcaaaaagacttcccgatgatgcggctggtgcagggcgacgtcggctccggcaaaacgctggtggcggcgctggcggcgctgcgcgccatcgcgcacggcaaacaggtggcgctgatggcgccgaccgagctgctggccgagcagcacgccaacaatttccgccagtggtttgaaccgctggggctggaggtcggctggctggccggcaaacagaaaggcaaggcgcgcatcgcgcagcaggaagccatcgccagcggccaggtgtcaatggtggtcggcacccacgccatcttccaggagcaggtacagttcaacggcctggcgctggtgatcatcgatgagcagcaccgcttcggggtacatcagcggctggcgctgtgggagaaaggcgaagagcaaggcttccacgcccatcagctgatcatgaccgccacgccgatcccgcgcacgctggcgatgaccgcctatgccgatctcgacacctcggtcatcgacgagctgccgccgggccgcacgccggtgaccaccgtcgccattcccgatacccgccgcgccgacatcattcaacgggtgaaaagcgcctgcctggaagaggggcggcaggcttactgggtgtgtacgctgatcgaggaatctgagctgctggaagcgcaggcggcagaagccacttgggaggaattgaaagccgcattgccggagctgaaggtggcgctggtgcacggccgcatgaaagcgcaggagaagcaggcggtgatgcaggcgtttaaacagggcgagctgcagctgctggtcgccaccacggtgatcgaagtcggcgtcgacgtaccgaacgccagcctgatgatcatcgaaaacccggaacggctgggcctggcgcagctgcaccagctgcgcggccgcgtagggcgcggcgcggtggcctcacactgtgtgctactgtacaaaacgccgctgagcaaaaccgcgcaaacgcgcctgcaggtgctgcgcgacagcaatgacggcttcgtcatcgcccagcgcgatctggagatccgcggcccgggcgagctgctcggcacccgccagaccggcagcgccgaattcaaagtggcggacctgctgcgcgaccaggcgatgatccccgaagtgcagcgcgtcgctcgccacctccaccagcactacccggaacacgcccaggcactgattgaacgctggctgccggagaaggcgcgctactccaacgcataaaaaagggcgccgacggcgccctcttctttttttctggctcgcgatatcaccccaccgccgggaacaccggcagcagcagatacagcttgatgacaatggcattggcgatatcgataaagaacgcccccaccatcggcaccaccaaaaacgccacgtgcgacgggccgaaacgatcggtgatcgcctgcatgttggcgatcgccgtcggcgtggcgcccatgccgaagccgcagtggccggcggccagcaccgccgcgtcgtagttcttgcccatcacccggtaggtgacgaatatcgcgtacagcgccatcaccagcgtctgcaccgccaggatcgccagcatcggcagcgccagcgaggctagctcccacaggcgcaggctcatcaacgccatcgccaggaacagcgacaggctgacgttacccaacaccgacaccgcccgctcaaacacggtatagaagccggtgaaggccagcgtgttgctgaggatcaccccgacgaacagcacgcaaacgaagttcggcagttcaaacaccgtgccgctcagcaggccggcaatcaattgccccaggctcagacagatggcgatcatggcgatggtttcgatcatcaccagcgaggtgatgagacggccgctttccggcttctcaaaaccgctcggctgcacgctgtcatccggggtgccttccggcgtggaggagtgcttgaccagatagcgcgccaccgggccgccgatcagaccgcccagcaccaggccgaaggtggcacaggccatggcgacttccgtcgcgttttcaaaaccgtagcgctcgatgaacagcttgctccaggccgccccggtgccgtggccacccgacagggtgatcgatccggcaatcaggcccatcagcggatccagccccagcattttcgccatgccgatgccgatggcgttctgcacgataagcagccccagcaccacgaacaggaacactaccagcaccttgccgccggcgcgcaaacgcgccaggttggcgttcaggccgatggtggcgaagaaggccagcatcagcggatccttcagcgacatgtcaaaactgacttcccagttgacgagctttttcagggctaacagcagaagggccaccagcaaaccgccggcgacgggagcgggaatggtatattttcgcagcaggggaatggttctgacgcacttgcctccgaggagcaaaaccagcgtcgccgcgactaacgtgccataagtatcaagatgaaacatccaggtactccatgtaagggaaaagatccaaataaaaataataagttatagaaaaccacttagtttttaaacttgatgagtgcaggattagaagtaaaaaacgctgagatgacaagaaaaaatgaatgaaaatgcgacataaacgggaaagtcggcaacataatatttacgcgcaaccgtttgcttttgcggggcggggcattaaaatgcctgctttgccgtatctggaaacgccacaccatgagcatgtcatcctccgagcttgatgccgcgcgccaagccgcctcagaaccccgcgccagtgaactgatttatcgcctggaagatcgcccgccgctgccgcaaacgctgtttgccgccggccagcatctgctggcgatgttcgtcgcggtgatcacaccggctctgctgatctgccaggcgctgggcctgccggcacaggatacccagcacatcatcagcatgtcgctgttcgcctccggtctggcttccattctgcaaatcaaaacctgggggccggtgggttccgggctgttgtcgattcagggcaccagcttcaatttcgtttcgccgctgatcatgggcggtctggcgctgaaaaacggcggcgccgacgtgccgaccatgatggccgcgctgttcggcaccctgatggtcgcttcctgcaccgaaattttactgtcgcgcgtgctgcatctggcgcgccgcattatcaccccgctggtttccggcatcgtggtgatgatcattggcctgtcgctgattcaggtcggtctgacctcgatcggcggcggctacgccgcgatgaacgatcacagcttcggctcaccgaaaaacctgctgctggccggcgcggtgctggcggtcatcatcctgctgaaccgccagcgcaacccttacctgcgcgtcgcttcgctggtgatcgccatggcggtcggctatctgttggcctgggcgatggacatgctgcccgcaggcgcatcggcagccccaacggcggcgatcaccattcccacgccgctctattacggcctgggcttcgactggaacctgctgctgccgctgatgctgatctttatggtcacctcgctggaaaccatcggcgacatcaccgccacctctgacgtctccgaacagccggtcagcgggccgctgtacatgaagcgcctgaagggcggcgtgctggccaacggcctgaactcgatgctgtcggcggtgttcaacaccttccccaactcctgcttcggccagaacaacggcgtgatccagctgaccggcgtcgccagccgttacgtcggcttagtggtggcgctgatgctgatcgcgctggggctgttcccggcggtggccggcttcgtgcagcacattcccgagccggtactgggcggcgcgaccatcgtgatgttcggcaccatcgccgcctccggcgtgcgcatcgtgtcgcgcgagcgcctgaaccggcgcgccatcatgatcatggcgctgtcgctggccgtcggcatgggcgtctcccagcagccgctgatcctgcagttcgcgccggactggctgaaaaccctgctctcttccggcatcgccgcaggcggcattaccgccatcgtgctgaacctggtgttcccgcaggaacacgagaaaaagtaacccgcccattgacgttcaaacggccgcttgcggccgttttttattgtctatcagaccattgcccttgagatgcccggccaattgcggcataaacagggtatcttttttgaccgatgcggatgtagacgatgaaatttatcggaaagctgttgctgacgttgctgctgctgaccgtgctggcggcggtggtgctgtatctggtggggcaaacccgctgggcggcaggccgcctgagcgcctggatcagcgacaacagcgaataccgcctgtcgataggaaaaatcacccactcgtggaatcagccgggccagatcggtctggaagaggtgcagctggcgcgcaatggccagccgcaggcgctggccgccaaacgcgtcgatctcggcctcagcctgcgccaaatcaccgaaccgcgctatttccacagcgtcacgctgcgtgacggcacgctgaacgtgcagccgcagactgctgcgctgcctgtacaggccgacgtgctgcagctgagcaacatggcgctgcaatccaacgataacgagtggcagctcaacgcgcagcgggtcaatgccggcatcacgccgtggcgcccgctggccggccatctgctgggggacaacaatcagttccagttcagcgccggttcgatgacgctgaacggcattcccgcttcgaaggtgttggtgcagggggagcaaaaacagggccagctgctgttgaacaatttcggcgccgatctggcgcagggcgacctgaccggcgtggccagccgcgccgccgacggcagttggcaagtggatcgcctgcggctgagcggcgtgcgcatgcagaccccgttgacgctggcggaattcatgcagcgctttaccaccctgccgccggtcaccctcaagcgtttcgatctgatcgatgcgcgcctggaaggcaaggcgtgggcgtttaacgatctcgatctgtcgctgcaaaacgtcagcatcgaaaaaggcgactggcgcagcgaagacggctcgctcaacgtcaatgccagcgatgtgatcaacggcggtttccacctgatcgacccgatcgccaccctgcgcctctcctccgccggcatcgccattcagcaattcaccacccgctgggaaggcgggctgctgcgcacctccggcaattggctgcgcgccggcaaacgcctgcagctggatgaagtggccatggcggcgctggagtacaccctgccaatcgactggcgcgagctgtggctgaaaccgctgccggactggctggcggaggtgtacgtcaccaagctgaccaccaaccgcaatctgattatcgatatcaacccggcattcccgttccagatcaccgcgctggacggttacggcagcaacctgctgctggcgcgcgaccaccagtggggcatttggtccggttcgttaaacctgaacggcagcgaggccaccttcaacaaaatcgacgtgcggcgcccttcgctggcgctgaacgccgacgccaaccagatcgccgtcaccgaactcagcgcctttatgcccaatgggctgcttgaggccaacgcgaccgtcgatcagctgccgggcaagccgttccagctgacgctgcacggccgttcggtaccgctcaataccttgcagcaatggggatggcagccggtgccgctgacgggcgacggcaaccttgagctgcagttgaaagggctgttgaacagcgacgggccgttcaaagcttcattgaaggggactctgcaagccaccgccggcgacggccagacggtgaaccaacagctgccgtaatctatcgcgcggcccaccgccaggcagggccgccgttttactcttccagcgcttcggaaccgccctgatccagcggcacatccggctcggccggcaacaccatgtaagtgccttcgaacaccgcgcccttatcctcatcgccgaacagatgcacttcggcgtgcacgcgcgcgcggcggccccgcgccagacgcgccaaatcaccgcttagcgaaccgagatccgccaccgcccgcggcctgccggtgatcggtttgctgtagcgaatgtgcgcgtccgccagaatgatagtgccaccgagatggcgctcgcgcagcagcagccaaatcagcccccaggcggtcagcgtcgccagcgagaacaggctgccggcaaacagcgtatggtgcgggttctggttgccgatctccggcatggtggtgacgaagcgctggccggtgtactggctgatacgcacgcccatcttttcgctcagggggatatgttcataccaggcctgctgcaattggccgcaccaatcggggcgatgcaggatatcgtccagcgtcgctaccggtttgatcatcaaaaagtggcggatcggggtggtctgcggcgcagtgatctcgccctgattgacgaaccccagcttggcaaagaaatccaccgcatcttcacgggcgctgcacaccacccgcttcacgccttcctgccgcgcgacggactccagcgtcatcgccaccaacgtccccagccctttatcctgcagcgtcgggtctaccgccagaaaacggatcgccgcctcgttgtcggcattgatgtacagccgcccgatggcgacgattttaccggcctcgtccaccaccatttggtgatgggccatggcgtcataggcatccttttccgaacccaccggctggtgcagcggcttgcgcagcatttcccagcgaaactggtaatactctttcagttcttgctctgttacgggtactcgtaggtgatacatagacgcctgttctccgaatgcttagacctgtagccagaatgtcaccggaccatcgttgaccagcgccacctgcatgtcggcggcgaactcgccggtctgggtctctacgccgcgttcgcggcactggccaacaaaatattgatacaaccgatcggcttcttgcggcgcggcgccgcgcgagaagctgggccgcatgcctttgtgggtgtccgccgccagggtgaactgcgaaacgaccagcacgctgcccccggcctgctggacgttgaggttcatcttgtcgttctcgtcgccgaaaatgcggtatcccaacacgcgttcgcacaggcgctgcgctttttgctcgttatcgccctgctccacgcccaataacactaacaaaccggggccaattttgcctaccgtctcgccacccaccgtgacgctggcgtttaacacccgttgaatcaacgcaatcattcctgctgcccttctggttttggttcctgttgctccgccttctgccggcggtagtcgcgatattcgccgatggtcacggtgatttccgcgccaagtaacacgatacaccagctccagtagacccacaggaataaaatcgggatcaccgccagcacgccgtaaatcagctgataggaagggaacatggtgacgtacagcgcgaatcccttcttgcccagctcgaacagcaatccggccaccaccgcgccaatcagcgcgtctttgggcggcacgcgcaccgtcggcacgatgcaatacagcagccagaaggagatgcacgacaaaatcaacgggaagatgcgcagcacctgatccaccaggccattgacgccggtctgcgccagccagttgagcgacagcaggtaagaactgatggccatgctggcacccaccagcagcggccccagcgtcagcaccatccagtacacggcgaaggagaagacgatcggccgtttgttcttgctgcgccagatggtgttcagcacgctgtccaccgaggaaatcagcaacagcgcagtgacgatcagcccgcaggtgccgacggcggtcatcttgttggaattggcgacgaactgttccaggtagttctggatcacgttgccggcggccggcacgaaattggaaaagataaagctcttcagctgctcgctgatgtcggaaaacatcgggaaagccgcgaacagcgcgaacaccacggtgaccagcggcaccagcgacagcagggaaacataggcgagatggcccgccaacatcgtcaggccatcatgatcgatacgctggtacagcagccgtccgaaggtgacgccgggcttaatcgcagagggcagcttcttgcggcggaaaaacgacatggtcactccttgatgtccgttgatacgccttaagcttaacgcgccctgcgctcattgagcaaaataggccggcaccacgtcgcgatcggtgacgtgcaccgtcttgatccccagcgcctgcgcggcgaggacgttcgccgggtgatcgtcgaagaacaccgcgtcggcggcggcggtgttttccgcggccagcacatgttgatagatatcggcctccggcttgcgcatgccgagatcttgcgacaaatagagatgatcggcggcggcggccacttcaggatagtgctgcggccagtagttgcagtgcagacggttggtgttcgacagcaccaccacccggtggccttcgttgcgcaggcgctgcatgatgtcgatcacttccgggcgcagcgcgacaaataccgcctgccagccggtggcgaattgttcgaagctgagcgcaatgcccatttcatcgcacagcttgccggcgaagtcttcatcgctgatttcaccgcgctcatgttgctggaacaccttacccatggcgaaacgatcggacagcaccgccaacggcgtgccgctcaaattgctccacacgcccagcacacgcttgaaatcgatatcgacgatcacattacctaaatcaaagatatacagcatagtcctctcctgatgggccggtgagatttcactgtagcgggaaaaggaacagctgaacagggagcgaacggaaaagcgcatagcgcgccgcacaaacggggaacaacagaggaaaaaactcagggcgcgagaaccgcgccctaagcatgagacactcaatcagcgattaagcgtctttaggaccgcggctggcacgcttacgatcgttttccgtcaggtgacgcttacggatacggatcgaggttggcgtcacttctaccagttcgtcgtcatcgatgaactccagagcttgctccagggtcattttgatggccggaaccagggtagtcgcttcgtcagtaccggaagcacgcatgttggtcagcttcttaccggtcaggcagtttacggtcaggtcgttggaacgtgagtgaataccgatgatctggccttcatacacttccgcaccgtggcccaggaacagcttgccgcgatcctgcaggccgaacagcgcgaacgcgaccgctttgccttggccgttggagatcagcacgccgttctgacgctggcccacttcgcccggacgcacgtcgtcgtagtggctgaaggtggagtacagcaggccggtacccgaagtcatggtcatgaattcgttacggaagccgatcagaccgcggcttgggatcacgtagtcgagacgcacgcggcccttaccgtccggatccatgtttttcaggtcggctttacgctcacccatcgcctgcatcacggaaccctgatgctgctcttcgatatccagcgttacgttctcgaatggctcctgcttgcggccatcgatttcgcggaagataactttcggacgggaaaccgccagctcgaaaccttcgcgacgcatgttttcgatcagcaccgacaggtgcagctcgccacgaccggatacgcggaaggcgtccgcatcgtcggtttcttcgacgcgcagcgccacgttgtgcaccagctctttgttcagacggtcaaggatctgacgcgaggtcacgtacttgccttctttaccgcagaacggcgaggtgttgacgttgaagaacatggttacggtcggttcgtcgacggacagcgccggcagcgcttctacggcgttggtgtcgcagatggtgtcggagatgttcagctcgcccaggccggtgatggcgatgatgtcgcccgcttccgccagggtgctgtcgatacgctccagacccaggtgacccagcactttacccactttaccgttgcgagttttgccttcgctgtcgatgatggtgacctgctggttcggcttcactttaccgcgcttgatgcggccgatgccgataacgcccaggtagttgttgtagtccaactgggagatctgcatctggaatggcgcttccagctcaacctgcggcgcagacacgtggtcgacgatcgcctgatacagcggggtcatgtcttccgccatgtcggtgtggtcgacgccggcgatgccgttcaacgcagaagcgtagatgatcgggaagtcgagctgctcgtcggtcgcgtcgaggttcacgaacaggtcgaacacctgatccacaacccagtcagggcgcgcgccaggacggtcaaccttgttgatgaccacgatcggcttcagaccgttggcgaaggccttcttggtcacgaagcgggtttgcggcatagggccatccattgcatccacaaccagcagcaccgagtcaaccatcgacatcacgcgctctacctcgccgccgaagtcggcgtgtcccggggtatccacgatgttgatacggtaaccgttccaattaatggcggtgttttttgcgaggatggtaatcccacgctctttctccaaatcgttggagtccattacgcgttcggtggcttccgcacgctctccgaaagtaccggattgttgcagcagcttatcaaccagggtggttttaccatggtcaacgtgggcaataatggcgatgttacgcaaattttcgatcacagctttgcctcgggcattagaaatagcgcgctattgtacacgtattaagcgagggactaaacaagatcacaaccatctcttataaacaaccgcgtaccggtcagtttgtgatccctttcacggtgcaaaaagccgcaatcgttgcacttttgcaccatttcagtgcccacgcccaccccaattgcaccattccggtgcaatttatcactgatggtgcatactgtggttgggtaaaacccgcgcagaaaggcgatgaaagccttttttaaaagttggcacgcttttcgctttagtcttttcaaggcgaaaaaaagccagttccacagattcgttccacgacgacgacaatgataaaccgggagagttaagtatgtccgctgaacacgttttgacgatgctgaatgagcatgaagtgaaattcgtagacctgcgtttcactgacaccaagggtaaggaacagcacgtgactatcccggctcaccaggtaaacgccgacttcttcgaagaaggtaaaatgtttgacggctcctctatcggtggttggaagggcatcaacgaatctgacatggtgctgatgccggacgccagcacggcggttctggatccgttcttcgaagaacctacgctgatcattcgctgtgacattctcgagccgggcaccatgcaaggctacgatcgcgacccgcgctccatctccaaacgcgccgaagacttcctgcgctcctccggcatcgcggacaccgtgctgttcgggccagagcctgagttcttcctgttcgacgacatccgcttcggcagcagcatccgcggttcccacgtggcgatcgacgatatcgaaggcgcctggaactccggcacaaaatacgacggcggcaacaaaggccaccgtccggcggtgaaaggcggttacttcccggttccaccggtcgactcttcgcaggatctgcgttccaccatgtgtctgaccatggaagagatgggcctggtggttgaagcgcaccaccacgaagtggcgaccgccggtcagaacgaagtggcgacccgcttcaacaccatgaccaagaaagccgacgaaattcagatctacaagtacgtggtgcacaacgtggcgcacgccttcggtaaaaccgcgaccttcatgccgaaacccatgttcggcgacaacggttccggcatgcactgccacatgtcgctgtccaagaacggcaccaacctgttcgccggcgacaaatacggcggcctgtctgaaaccgcactgttctacatcggcggcatcatcaagcacgccaaggcgatcaacgcgctggccaacccgaccaccaactcgtacaaacgtctggtgccaggctacgaagcgccggtgatgctggcttactccgcccgtaaccgctccgcgtccatccgtatcccggtggtcgccagcccgaaagcgcgccgcatcgaagcccgcttcccggatccggcggctaacccatacctgtgcttcgccgcgctgctgatggccggcctggacggcatcatcaacaagatccaccctggcgatgccatggacaagaacctgtacgacctgccgccggaagaagaagccgagatcccaaaagtggccggctcgctggacgaggcgatggccgcactgaacgaagaccgcgagttcctgacccgcggcggcgtgttcaccgacgatgcgatcgatgcctacatcgaactgcgcaaagaagagatggaccgcattcgcatgacgccacacccggtcgagttcgaactgtactacagcgtctaagccctacccgcgccgtctgaaaaggcggacggcgcccacaatttttgttatcgcttttttgttgccgtggaaactttcagcccatcttcggatgggtttttttctccaccgtattttctgcaaaactattccataccgcgcctatcccggatggagtaggatagatgcactaaaaaggtgcaggagtctgctgtatggcaactggcaagctgcccgatgctgggcagatcctcaattcactcatcaacagcatcctgctgttggatgactcactggcggttcactacgccaacccggcggcacagcagctgctggcgcaaagctcccgcaagctgttcggcacgccgctgcccgatttgcttggttatttttcgctgaacgtctctttgatgcgcgaaagcctgcgcgccgggcagggcttcaccgacaacgaagtaactctggtggtcgacggccgcgcgcatatcctttccctgaccgctcaagcgctgccggaaggctatatcctggtcgaactggcgccgatggacaatcagcgccgcctgagccaggaacagctgcagcatgcccaacaggtggcggcccgcgatctggtgcgcggtttggcgcacgagattaaaaacccgctgggcggcctgcgcggcgcggcgcagctgctggccaaggcgctgcccgatccggcgctgaccgaatacaccaaggtgatcattgagcaggccgatcggctgcgcaatctggtggatcgcctgctcggaccgcagcggcccggccagcacatcacccaaagcatccatcaggtcgcggagcgcgtctgccagctggtgtcgctggaaatgccggataacgtcacgctggtgcgcgactacgatcccagcctgccggaaatggcccacgacccggatcagatagagcaggtgctgctgaacatcacccgcaatgcgctgcaggcgctgggtgaggcgggcggcaccatcacgctgcgcacccgcaccgcgtttcagattacgttgcacggcacccgctatcgcctggcggcgcgcatcgatgtcgaagacgacggccccggcgtgccggcgcagctgcaggacacgctgttctacccgatggtcagcggccgtgaaggcggtaccggcctgggattatccatcgcccgcaatctgatcgatcagcattgcggaaaaattgagttcaacagttggccaggtcataccgaattctcggtctacctgcccattcgccagtgaggtttgcaatgcaacgagggatagtctggatcgtcgatgacgatagctccatccgctgggtgcttgagcgcgcgctcaccggcgcgggcctgagctgcgccaccttcgaaggcggcaatgacgtgctggaagccttggccacgcaaacccccgacgtgctgctgtccgatatccgcatgccgggcattgatggtctggcgctgctcaagcagatcaaacagcgccacccgatgctgccggtgatcatcatgaccgcgcattcggatttggacgccgccgtcagcgcctatcaacaaggggccttcgactacctgccgaagccgttcgacatcgacgaagcggtggcgctggtcgagcgcgccatcagccattatcaggaacagcagcagccggtgcgcagccagccggccagcgatccggcggcggacatcatcggcgaagcgccggcgatgcaggacgtgtttcgcatcatcggccggctgtcgcgttcgtcgatcagcgtgctgatcaacggcgaatccggcaccggtaaagagctggtggcacatgcgctgcaccgccacagcccgcgcgccaaatcaccgttcatcgccctgaatatggccgctattcccaaggatctgatcgagtccgagctgttcggccacgagaaaggcgccttcaccggcgctaaccaaatccgtcaggggcgctttgaacaggccgacggcggcacgctgttcctcgacgagatcggcgatatgccgctcgacgtgcaaacgcgcctgctgcgggtgctggcggacggccagttctaccgggtcggcggctatgcgccggtgaaggtcgacgtgcgcatcatcgccgccacgcaccagaacctggagctgcgggtacaggaaggcaagttccgcgaggatctgttccaccgcctgaacgtgatccgcgtacacctgccgccgctgcgcgagcgccgggaagacatcccgcggctggcgcgccacttcctgcagatcgccgccaaggagctgggcgtcgaggccaagaacctgcatccggaaaccgaaaccgcgctgacccgcctgccctggccgggcaacgtgcgccagctggagaacacctgccgctggctgacggtgatggccgccgggcaggaggtgctgattcaggatctgccgggtgaactgttcgaaaccgccgcgccggaaagccccagccacagtctgccggacagctgggccacgctgctggcgcagtgggccgatcgcgcgctgcgttccggtcatcaaaatctgctgtcggaagcgcagccggaaatggagcgcacgctgctcaccaccgccctgcgccacacccaagggcacaaacaggaagccgcgcgcctgctgggctgggggcgcaataccctcacccgcaagcttaaagagctgggcatggaataggaacggggtggatgatgaaaaacgcagtccggcgcacaaaaaaacgccaaccacagactttacagccggcgcgggcgcagtatgatcttgtcgcacactctggaggttgacgatgctggactcattcatcgtattcatttctcagggcgcggagctgggctccgccgccagccacaccccgcaggcggcggtcgccgcggtgttgtgcgccgcgctgattaacttcttcagttaaaaaaacagccgcatcagcggctgttttttcatcctcagatcacccgagagaactgctggctgcgcgcctgttgccgcagatagcggtcgaagcacatgcaaatattgcggatcagcaagcgcccgcgcggcgtgacgcgaatgccctgctcgtcgcgctccaccagcccatcgcgttcaaacggcgccagcagctgcaggtcttcggcgaagtaagcggtgaaatcgatgccgtattgccgttcgagcggctgatacgccaaccggaagttgcagatcagggttttgatcagatcgcgccgcagacaatcgtcgtccgtcagcgccagcccgcgccacagggcgttgccctgcgccggtacgctgtcatagtaacgcttcagctctttctggttctgcgcatagctgtcgccgagcatgctgatggccgacacgcccaaccccagcagatcgctgtcgccctgggtggtgtagccctggaaattgcggtgcagcttgccttcgcgttgcgcaatcgccagctcatcgtccgggcgtgcaaagtgatccatgccgatgaactgatagccggcgtcagtcaggaacgcgatgctctgctgcaggatatccagcttctgctgcgcgctgggcagatcggcgtctttgattttgcgctgggcggcgaataaattcggcatatgcgcgtagttgaacacgctgaggcgatcgggattcagttcagccacccgctgcagggtgaaggcgaaactttccggcgtctgtttcggcaggccgtagatcagatcgatattggtcgagcggaagcccagcgctttggcccgctcgatcagggcgaaaatgaaggcttcatcctgctcgcggttgaccaactgctgcacctgcttgttgaaatcctgcacccccatgctcaaacggttaaagccttcggcgcgtaaatgatcgagcacatccagcgctatctcgcgcggatcgacttcgatcgacatctccgcatcgggcagaaaatcaaaatgttcgcgcagcaccgccaccagccggctgatttgcgctttatccagataggttggcgtaccgccgccccagtgcatctgaccgaccttgcggccggcgaacagcggcgcacggctggcgatctcttgcgccaggacattcaggtattcatcggccttgtgcgtctggcgcgtcaccagtttgttgcagccgcagaagtagcacagcttatggcagaaagggatatgcacgtacagcgacagcggccgctcagggtagcgcgccgcggcgcgttgaaacgccgcttcgtcgtagcgctggttaaattccagcgccgtggggtatgaggtataacgcggccctgagtagttatatttttggatcagggccaaatcccagacaatcgtctgctctgacatgctcactccttccgatatctttttctaccgggccgggagaggggcggttgtctgcgctgtctggccacggaagtgctgcgaaaacgcgctttgcgcttagacagcccccatagtttaccgaataaccacagcagataacacatcaagagtagggctattgtcgggatcagccacatggcgcgttaaaaggcgtccttcgggttgccgcctttcagcagcttcagaatatcttcctgcttctcttcttcttcctcgtcgtcttcatcgcccagctcgatgcccagcacgtccatcagcacatcgatacgatccagcgtcttgtcgacatacgcctgctcttgcgcgttcagcgtttcgccatcgtcgatgcgatccagcagcgcgttcaggcgttcgtcattttccagcttcgccagctcttcttccggcgacaggcgcggtttcgcttcggcctttggcttcggctgcggtttggccttcactttggtttcgtcgaccaccagcgcaaccggcactttactgccgatacgcggatctttggcttccgccgccgatttgtttttttggctgccggactcaacctgggtgcgtgaaccggaagcgtggccgcggcgctttttcaggcgtttgcgctcgcgcgcttcctgatcgagctccatacggcttttctttttcgtttttgacttcgccgcgctgccgcgaggtgcttttgatggctggttcatagcgtgtgctcttaggtatgtagattcagtatagaattgcggcggaatctagcagaaagcggacaaagaaaaaaggcggcaggttaaacctgccgcctatttcgcaccttcttgcgaagggtattcctgttacgcgctccttgcgtacatgcaacatcccggtttttccttctgctataaccgcattccctgccactacgtccttcatcctgaaaggaaaatcgtccatggcgcaatcctttcgcatccgctcttcccgagcgcgcttcctgcgggcatccaaactgccgatacttcaccatccgatgtgcctgccgcctattccggtgcgaaagggtcacttccttttgcgttcatcctggcactcattgcacgccctgtgcattccctgagatttgtcatccttcccggatgttccctaatcctgcgcaaccctgcgttaacgagtactttacgttattgttgcgaaggctcaaggcacctgacgccgatttgactgacattttcacacaacgaaaaaataatatgttgtttttaaaataaaaacataaatatcactttcgaataaagcgacattacccgcgattcgaatggcaaatgtctcacaacgtacggtcggcttaactgttgttttatcgcgccccaccgcttaaaaacggagaaacacgccatttttaccgctgatgcagttataatcgccaaccagttagccatcctcacggagacgaaaaattttgaccagcaagaactacaactatcatgtgacccatttcgtcaccagcgcacccgatattcgccatcttccgggggatgcaggaattgaagtcgcctttgccggccgttccaacgccggtaaatccagcgcgctgaatacgctgaccaaccaaaaaagcctggcgcgcaccagtaagacgccggggcgcacccagctgatcaacctgttcgaagtggaagacggcattcgtctggtcgacctgccgggttatggctacgccgaagtgccggaagaaatgaagcgcaaatggcaacgcgcgctgggcgaatacctgcagatgcgcaacagcctgaaagggctggtggtgctgatggatatccgccatccgctgaaagatctcgaccagcagatgatccagtgggcggtcgacgtcggcacgccggtgctggtgttgctgaccaaggccgacaagctggcctccggcgcacgcaaggcacagctcaacatggtgcgtgaagcggtgctgccgtttatgggggatatccaggtcgaagccttctcatcgctgaaaaagatcggcgtcgacaagctgcgccagaagctggacacctggtttaacgagatcccgccggaagtgctgccggaagaggacatcggcgaataagccctgatcgcacgtttgagccgatgtcttaccgcatcggcttttttatgcccgcagatcggccgcaggcgggattttttgttatctaattacacttttgaaataaagccatcataaagacttattgccaaaacgggcttgtctcgccgaattacgcggattgagggagcggaagctgaaatgaaaagcggggccgagcgataggaaaaacgtatggtttgctgctgtttttacaataaaaaacgccccagtcaatactgactggggcggctaaatattcagccaaatccgattacgtgaagtaaaaggtctgaaagatagaacatcttacctctgtaccctacgcctgtaactctacatcattttttcgcagggaaaaagaattttttgtagtttacttacacaatttgcggcgcaagaacggcgaagttggggaaactatcgccgcatcttgtagcttaattacgaaaagagcttagcttctcgccagttagcgcatacggcgataacccggcgatcagtgcgcttcatcccagttcatgccgacgcccacatcgaccttcagcggcaccgccagagccatgctgccttccatcagttggcggatgcgctggctggcttcttcgatcaccgattcatgcacctcgaacaccaattcatcgtgcacctgcatgatcgcgcgcaccaacggcttctcctgcccttgcagccaggcgtcgacctcgatcatcgcacgcttgatgatatcggctgccgtgccctgcatcggggcgttgatggcggcgcgctcggccgccttgcggcgcatggcgttgctggagcggacgtccggcagatacagacggcggccgtccagcgtgctgacatagccctgctcggaagcctgctgacgggtgcgctccatgtaatccagcacgcccgggtaacgctcaaagtagagatccatatagcgctgggcttccccacgcgggatccccaactgacgcgccaggccgaaggcgctcatgccgtaaatcaaaccgaagttaatcgccttggcgctgcggcgctgctcgccggtcactttatccaacggcacgccgaaaacttccgacgccgtggcgcggtgaatgtctttcccttcggcgaaggccttcagcagcccctcatcctgtgacagatgcgccatgatgcgcagctcgatctgcgagtagtcggccgcaacgatgcggtagccttccggcgcaataaaggcctggcgaatgcgccgcccttcttcgttgcgcaccgggatattctgcaggttcggatcgctcgaggagaggcggccggtggcggtcaccgcctgatggtacgaggtatgcacccggccgctggccggattgatcatcaacggcagcttgtcggtataggtggtcttcagtttcgccaggccgcggtattccaggatcaccttcggcagcgggtagtccagcgccagctcggccagcacctcttcgttggtggacggcgccccgcccggggttttcttcagcaccggcagcttttgtttttcgtacaggatcgcctgcagctgcttggtcgacgccaggttgaacggctcttccgccagctcgtgggcctgcgcctccaactctgccagacgcttggccaactcctgggagtgggccgacaaaatggccggatcgatcagcaccccggtgcgttcgatatgcgacagcaccggcagcagcggcatttcaatctcattgaataccgtcagcagttccgcgctctgtttcagctgcggccacatcgccaggtgcagctgcagcgtgacatcggcatcttcggcggcgtaaggcgccgcctgctccagcgcgatctgattgaacgtcagctggtttttgcccttgccggcgatctcttcgaaggtgatggttttgtggcccagataacgatcggccaggctgtccatatcgtgacggccgccgacgctgtccagcacataggactccaacatggtgtcgtaggcgatgccgcgcatctcgatgccgtagcgcgccagcaggctcatgtcgaacttcaggttttgcccgaccttgagcgccttctcgtcttccagcagcggcttgagcgcctccagcacataagcgcgatccagctgtgccggcgcatccaggtaatcgtgcgccaccggcaaataagccgcttcgcccggcgcgatcgcgaaggacaggccgatcaggttggcggtcagggtatccagaccgtcggtttcggtatcgaaggcaaacacgtcggcctttttcagccgagccagccagtcggtaaaggtcgcttcctccaggatagtgacatacccgtcctgggacagcttggcttccgccaaggctttcggcgcttccacggcggctgccggtttggcggcgccggcagctttcgcgcccgcgcctttcttgttttccagccagacgccggcttccacgtccgccagccagcgtttgaactcgtactgtttgaacagctgttgcagcgtatcgacatccggctcagataccgtcaggtccgcgcaggtcagatccagttcgacgtcggttttgatcgtcgccagcttataggagaggtacgcgacctctttgttctgctccagcttggccgccatagttttggcgccgcggaagctcagcgtggcgatgttctccagattgccgtacagcgcatccagcccgccgatcccctgcagcaacgcctgggcggttttctcgcccacgcccggtacgccgggaatgttgtccgatgaatcgcccatcagcgccaggaagtcgatgatcaactccggcggaatgccgtatttgtcgcacacttcctgcgggccgaggatcgtgttgttcatggtgttgatcagggtgacgttcggcgtcaccagctgcgccatgtctttgtcgccggtgctgatcagcaccgcatggccggccttttcggcctccagcgccagcgtaccgataacgtcgtccgcctcaacgccgggtgtcaccagcagcggcaggcccatcgccttgaccatgctgtgcagcggctcgatctgcgcgcgcagatcgtccggcatcggcggccggtgtgatttgtattcagcgaagagatcatcgcggaaggttttccctttggcatcaaacaccacggcaacgtggctcggttgatactgcagcagcaggctgcgcagcatattcagcacgccgtacatcgcgccggtcggctcgcccgccgagttggtcagcggcgggaaggcgtgataagcgcggtagaggtaggaggaaccgtcaaccaggattagtgggttttctgcaatctgggccatagcgtttctttatcgtgatcggacatagaggtaagcatgccatagctggccgccggagacgaaccttagcgtgcattgcggacgaaaatgatgtgattgtgtgcgaggatccgcaagatcttacctgtggataactttgtgcatagaaaagagaccgaattataacgctgcgattatcgttataacggcgaataaaattcctatttaaatcaccgcgttaaaagaacgaattccggcgatgctttattactggcatttattgaatttgtggatataactttcgccggattttaatcgcactattaatcaaattcggcgcctcaattaccatagcacaagctggacaagttgcacgaaaactcagcaaatggttatccatcgagacgaaaaacagtgatttttagcggcgctttaccccggcgatttctgttaaaatgcgtttttgttcatgcgctttggcatgcaacgatgttcccaacaaccgtcagcccataatcatgccaagattgttaacgcctgttatctttatcatttccgtcatacttaccattctggtgacggtgttgtgctccatccccatcacgctggccggcatcgtgaaactcctggtgcccattcccgccgtctggcgatatatctcggctttcgccgatttcatgatgtggtgttggtgccaagggctggcgctgttattgcgcattaacgggcaattgcgttgggatattgaagggctggaagggttggatcgcaaaaactggtatctgctgatcagcaaccacgaaagctggtcggacattgtcgtgttatgcgtgctgttcagaaatcatattccaatgaataagtatttcctcaagcaacagctcgcctgggtgccttttgtcggcctggcctgctgggcgctggatatgccattcatgaagcgttattcccgcgcctatttgctcaagcatccggaaaagcgcggcaaggatatcgaaacgacgcgccgttcctgcgaaaaattccgccagcgtccaaccaccatcgtcaatttcgtcgagggttcacgcttcaccgaagccaagaaaattaaaagcaattcgccgtatcgcaatttgctggcgcctaaagccgccggcatcgcgtttacgctcagcgcgctgggcaatcagttcgacaaagtgttgaacgttactctgctctatccggaaaataaccagcggccttttatggatatgctgtgtgggcggctgacgcgtatcgtggtgagaatagagacgctgccgatcgatgaaaccctgcacggcgactacttcaacgacaaacagttcaagcggcgcttccagctgtggctgaatacgctgtggcaggaaaaagaccggttgctggataaattgaagcggcaatacggataaaaaaacgccggcgatgccggcgtttttcatattgaatcaggcttatttctgctggctgaggaatttaaccacatcggcgaactgcttcacgtaagcgtccatcgagctggtgtccaggccatcgtttttaaccatgtatttgccgttgacgaataccgccggcacgccgcgcagctgcagatcttctgcggctttctcctgttgaaccaccagagatttcaccacgaagctgttccaggccgcgtcataatctgcagcggtcacgcccgctttcacgaagacgttgcggatatcgtccggcgtttgcacggtctgggttttctgcaccgcttcaaacatcagcgggctcaccttgtcttccacgcccagcgccatcgccaccgcccacgcctgagtcagctgtttgcccaacggccccaggaactccacgtggtacttggtcattttggtgccggcaggcagcgctttctttacgttctcagacacatgatagacctgctcgaactggtagcagtgcgggcagtagaaggagaagaactccaacacctgcggctcgccggtcaccggtttgtccagagtcacatactgagcgccatcgctaaactgtgccgccgaggcgctgaatgccatcaccatgccaacgagcgccaaccatatttttttcataagactaaactctccattgtgttaaagcttcaatacattggcgtcagctgcagagggggctcctgcaacagcttaacctgttcggtgaaggccacagtctgagacaaccagaaatcagactccgccatccacggaaaactcttagggaaggccggatcctgccagcggcgagcgacccaggccaggtaatacaccatgcgcatcgcccgcagtggttcaatcaacgccagctcgcgctgatcgaactcggcaaattcgctatacgcctccagcaagacatccagctgcatcagttgatcgcgacgttcgccatgcagcaacatccacagatcctgcactgccgggccgttgcgcgcgtcatcaagatcgacgaacagcgggccatcgcgccacagaatattgcccggatggcagtcaccgtgcaaacggcgcggctgccagttcagatgccagtgcgacttgatcgccgtaatcagattatccgtcgcctgcaggaacgcgtcacgctgcgttgccggtagcagcccgcaatcggccagcacctgacgcgggccggtgaggtactcttcaatccccatcgttggccgctcagcgaacaaacgctcaccgccgacctggtggatacgccccaaaaaacggcccacccattccaactgatccagattgtctatctcgtattgccggccccccacgctggggaacagggcaaagaaaaaaccgccgtgcgtatgcagggtagcgccttgcagcgccaacggcgccaccgccgggatctccgcgccggccagatccagagcgaactgatgttcctcaccgatctgtgcggcgctccagcgctccgggcggtaaaacttcaccacgtagcgccggcgatcttcgtccataaactgatagacgcggttctcgtagctgttcagcgccgtgaggccggaatcgacgcgcaggccaactccttctagcgcgtccataatcaaatcgggcgacagggtttcgaaattaaaagcagagttattcataacgttcgtttgatcgctgacagcacggtgccgggaatgagaaatagtagcattaatggcgcatttctcgcgctatgctttctcgcaccgcacgaggatcagtccttgataacgccgcgagcgcgcagcagcgccgttttaaaatcttcttcgtaatctttcttcagacccgggatctgatccgtgccggcgctaccgcgcattttcaggtgataaatgagaatgtcgtcgctcagttcggacaactcgccctggaagcccgcttccttcgccagcttttgcaaaaactgcatcaaattgagatcgggatcttcctgccaggccgggtgcaacagctcgatcaactcgtttacgcgatgcgttttcatctcaatatcgtccaatagcatgaataaactcacaaagtaacaggcttacccacacagtgaaagaaccggcttgtcaataaaggtaaatcctgatgtcacgcctgctttagcgctacaatcagcccatcgacaaggcgggataaacgagatgcataaagaaatcagcggcgtcattttggccggtggacgggccacgcgtatgggcggtgaagacaaaggcctggtgtcgattggtggtatcgcactctatcaacacatattggctcggttacggccgcaggtggcttccatcgtcatcagcgccaatcgcaatcaggcatgttaccaggcgagcggtttgccggtgattggcgatctgacgcccgatttcgccgggccgttggccggtatgctggccgggctcaagcaatcttccagcgaatgggtggccttcgtcccttgtgacgtccccgactttcccgctgacttagtggcacaactctggcggcaaaaaggcgcagcgccggctgcctttgccagcgatggcgaacgtgatcaccctacgctggcgttactgcatacccaactagcgccgcagctggccgactatctggcgcgcggtgaacgcaagctgatgctgttcttgcatcagattaacgcacaacgcgtggtgttcagcggacaacaagcggcatttcataacctgaatacgccggaagactgccgacattggcagcaaacacgagagctaaagaaatgaatcgttcattgcctcccttgctggccatcggcgcctacagcggtacgggaaaaaccaccctgctcaaacagctgatcccgttgctgaaacagcgtcaggtaaggattggactgatcaaacatacgcatcacgacatggatgtggatacgccgggtaaagacagctatgagctgcgtaaagcaggcgccgagcaaacgctggtcgccagcgatcgtcgctgggcattaatgaccgaaacgcaggagcaacgacctttggatctgcgctatctggctgggcgctttgacgccgataaggtcgacttgattctggtggaagggtttaaacatgagccggtcagcaagatcctgctttatcgggccaagatcggcaaaccgttggaagacatgttggatcagtttgtcgtggcggtagccagcgaccgaccactatccatctcagctaagcagctggatctcaatcaaccggaaagcatcgccgactttattgtcgagtggttgaaaggcgcagcgtagctgcgcttttttacgttttacgcatagcaaaaagccctgaacgtcagttcagggctttcggctttatttgatgcctggcagtgtcctactctcgcatggggagaccccacactaccatcggcgctacggcgtttcacttctgagttcggcatggggtcaggtgggaccaccgcgctattgccgccaggcaaattcgttttaatcaacccgcttcatcgctgaagcctgtcaatccaatctgtaaacaagctgaatattgtcttggtctcaccaaaacaccttcggtgttgtaaggttaagcctcacggatcattagtactggttagctcaatgcatcgctgcacttacacacccagcctatcaacgtcttagtcttaaacgttccttcaggggccttaaaggcccagggaagactcatcttgaggcaagtttcgcgcttagatgctttcagcgcttatcttttccgcacttagctaccgggcaatgccattggcatgacaacccgaacaccagcggtgcgttcactccggtcctctcgtactaggagcaacccctctcaatcttccaacgcccacggcagatagggaccgaactgtctcacgacgttctaaacccagctcgcgtaccactttaaatggcgaacagccatacccttgggacctacttcagccccaggatgtgatgagccgacatcgaggtgccaaacaccgccgtcgatatgaactcttgggcggtatcagcctgttatccccggagtaccttttatccgttgagcgatggcccttccattcagaaccaccggatcactaagacctactttcgtacctgctcgagccgtcactctcgcagtcaagctagcttatgcctttgcactaacctcacgatgtccgaccgtgattagctaaccttcgtgctcctccgttactctttgggaggagaccgccccagtcaaactacccaccagacactgtcctcaccccggatcacggggccgagttagaacatcaaacattaaagggtggtatttcaaggatggctccacgcagactggcgtccacgcttcaaagcctcccacctatcctacacatcaaggctcaatgttcagtgtcaagctatagtaaaggttcacggggtctttccgtcttgccgcgggtacactgcatcttcacagcgagttcaatttcactgagtctcgggtggagacagcctggccatcattacgccattcgtgcaggtcggaacttacccgacaaggaatttcgctaccttaggaccgttatagttacggccgccgtttactggggcttcgatcaagagcttcgccttgcggctgaccccatcaattaaccttccagcaccgggcaggcgtcacaccgtatacgtccactttcgtgtttgcacagtgctgtgtttttattaaacagttgcagccagctggtatcttcgactggcttcagctccatccgcgagggacttcacctacatgccagcgtgccttctcccgaagttacggcaccattttgcctagttccttcacccgagttctctcaagcgccttggtattctctacctgaccacctgtgtcggtttggggtacgatttaatgttacctggagcttagaggattttcctggaagcagggcatcaactacttctgcaccgtagtgcatcgtcatcacgcctcagggttaatatgcaaccggatttaccaggtcacaccccctacacgcttaaaccgggacaaccgtcgcccggccagcctagccttctccgtccccccttcgcagtaacaccaagtacaggaatattaacctgtttcccatcgactacgcttttcagcctcgccttaggggtcgactcaccctgccccgattaacgttggacaggaacccttggtcttccggcgagcgggcttttcacccgctttatcgttacttatgtcagcattcgcacttctgatacctccagcaaccctcacaggccaccttcaacggcttacagaacgctcccctacccaacaacgcctaagcgtcgctgccgcagcttcggtgcatggtttagccccgttacatcttccgcgcaggccgactcgaccagtgagctattacgctttctttaaatgatggctgcttctaagccaacatcctggctgtctatgccttcccacatcgtttcccacttaaccatgactttgggaccttagctggcggtctgggttgtttccctcttcacgacggacgttagcacccgccgtgtgtctcccgtgataacattcttcggtattcggagtttgcatcggtttggtaagccgggatggccccctagccgaaacagtgctctacccccgaagatgagttcacgaggcgctacctaaatagctttcggggagaaccagctatctcccggtttgattggcctttcacccccagccacaagtcatccgctaatttttcaacattagtcggttcggtcctccagttagtgttacccaaccttcaacctgcccatggctagatcaccgggtttcgggtctataccttgcaactaatcgcccagttaagactcggtttccctacggctcccctatacggttaaccttgctacaaaatataagtcgctgacccattatacaaaaggtacgcagtcacaccacgaaggtgctcccactgcttgtacgtacacggtttcaggttctatttcactcccctcgccggggttcttttcgcctttccctcacggtactggttcactatcggtcagtcaggagtatttagccttggaggatggtccccccatattcagacaggatgtcacgtgtcccgccctactcatcgaactcacgacctgtgcattttagtgtacggggctatcaccctttactgcgcgactttccagacgcttccactaacacacaagccgattcaggttctgggctcctccccgttcgctcgccgctactgggggaatctcggttgatttcttttcctcggggtacttagatgtttcagttcccccggttcgcctcatgccactatgtattcatgacatgatagtgtgtcgaaacacactgggtttccccattcgggtatcgccggttataacggttcatatcaccttaccgacgcttttcgcagattagcacgcccttcatcgcctctgactgcctaggcatccaccgtgtacgcttagtcacttaacctcacaacccgaagatgtttccatcgttcgcgctgcaaacatttgagagactctatgacaggttactcttcatcccagtacatctacggagggacaaatttcagccgtcatgtttcaattttcagcttgttccagattgttaaagagcaatatcttaaacatgactcggaagtcatctttaagatatggtgtatcgtcagatactgaagaccgccgctttcaccggatgggtcggaagcttggcgtcccctaggggattcgaacccctgttaccgccgtgaaagggcggtgtcctaggcctctagacgaaggggacacgacaccgtacttttatgacgcttttgctcgttactttttcatcagacaatctgtgtgagcacgccacgcgaagcaatatctttaggtaaggaggtgatccaaccgcaggttcccctacggttaccttgttgcgacttcgccccagtcatgaatcacaaagttgtaagcgccctcccgaaggttaagctacgatcttctttagcaacccactcccatggtgtgacgggcggtgtgtacaaggcccgggaacgtattcaccgtagcattctgatctacgattactagcgattccgacttcatggagtcgagttgcagactccaatccggactacgacgtactttatgaggtccgcttgctctcgcgaggtcgcttctctttgtatacgccattgtagcacgtgtgtagccctactcgtaagggccatgatgacttgacgtcatccccaccttcctccagtttatcactggcagtctcctttgagttcccggccgaaccgctggcaacaaaggataagggttgcgctcgttgcgggacttaacccaacatttcacaacacgagctgacgacagccatgcagcacctgtctcagagttcccgaaggcaccaatccatctctggaaagttctctggatgtcaagagtaggtaaggttcttcgcgttgcatcgaattaaaccacatgctccaccgcttgtgcgggcccccgtcaattcatttgagttttaaccttgcggccgtactccccaggcggtcgatttaacgcgttagctccggaagccacgcctcaagggcacaacctccaaatcgacatcgtttacagcgtggactaccagggtatctaatcctgtttgctccccacgctttcgcacctgagcgtcagtcttcgtccagggggccgccttcgccaccggtattcctccagatctctacgcatttcaccgctacacctggaattctacccccctctacgagactctagcttgccagtttcaaatgcagttcccaggttgagcccggggatttcacatctgacttaacaaaccgcctgcgtgcgctttacgcccagtaattccgattaacgcttgcaccctccgtattaccgcggctgctggcacggagttagccggtgcttcttctgcgagtaacgtcaattgatgaacgtattaagttcaccaccttcctcctcgctgaaagtgctttacaacccgaaggccttcttcacacacgcggcatggctgcatcaggcttgcgcccattgtgcaatattccccactgctgcctcccgtaggagtctggaccgtgtctcagttccagtgtggctggtcatcctctcagaccagctagggatcgtcgcctaggtgagccattaccccacctactagctaatcccatctgggcacatctgatggcaagaggcccgaaggtccccctctttggtcttgcgacgttatgcggtattagctaccgtttccagtagttatccccctccatcaggcagtttcccagacattactcacccgtccgccgctcgtcacccagggagcaagctcccctgtgctaccgctcgacttgcatgtgttaagcctgccgccagcgttcaatctgagccatgatcaaactcttcaattaaaagcttgatttgcttccactcgagaagcgatgctcaaagatttactgcatgaattttacttcagttagtcactcttcaagacttgatattttttgcatccgaagatgctggatatcgtcttgtggagtgcccacacagattgtctgataaattgttaaagagcagtgagttaggcgctttcgcttgctaactcgaggtggcgtatattacgctttcctctttcagagtcaaccctaattttcaggattttttctctgcgacccccggatactctgtgaagttgttcacatgttcccggtcagtggaggcgcattatagggagttctcggcaggccgcaacccctaattgcaaaaaacttttcaagcgcggattttttcaacaaaagggcgaaaaagcggcgaattaatgtcactttttcaggtaaacagccataaaagctggcgatcactggagtaaaatagaaataacgatgtcagtaaggatccgcagccatgccgttaaatgcacaacaacaggccgcccaacgcaatctttcttatctgcttgcagaaaaactcggccaacaaattctggcaggcgattatcaggccggcagcatcctgcctggtgaaatggaactgggcgagcaattcggcgtcagccgcaccgcggtgcgcgaagcggtaaagatgttagccgccaaaggcatgttgttgccgcgcccgcgcattggcacccgcgtgatgccgcaaagccaatggaatttcctcgatcaagatttactgacctggtggatgacgcgggaaaacttcgatcaggtgatgcaacacttccttatcttgcgcacctcgctggagccgcaggcctgcgcgttggcggcaaaccacgccagcccgcaacaaaccaagttgctggcggggctgatggcggaaatgcgcgcgctgcatacccagtttgatcgcgagcgttggatccaggtcgatacccaattccaccagcttatctacgaggccagcggcaacccgttcctgacctcgttcgccaacctgttcagttcggtgtaccaaagctacttccgcgccatcaccggcaatgaagtgatcaagctgcgccatcatcaggctatcgtcgatgcgatactcgccggagacagcgcaggcgcactcgtcgcctgccaggtgctgctgaaagagaaagactagacacgctccccgcttatatatagaagaaagagacgagggacagacgaccatttaaccaggaccgaccatgacccaatccgcgcgcagtatggcaggactaccgtggatcgccgcaatggcgttctttatgcaggcgctggacgccactatcctcaacaccgcgctgccggcgatcgcccaaagcctggggcgttcgccgctggcgatgcaatcggccgtcatcagctacacgctgacggtggcgatgctgatcccggtcagcggttggctggcggaccgcttcggcacccgccgcgtgttcatcttcgccgtcacgttattcaccctcggttcgctgttgtgcgccctctcccccacgttgagcgtgctggttgcctctcgcgtgctgcagggcatcggcggcgcgatgatgatgccggtcgcgcggttggcgctgctgcgcgcctacccgcgcagcgaactgctgccggtgctgaacttcgtcaccatgcccggcctggtcgggccaattctcgggccgctgctgggcggctggctggtaacctacgccacctggcactggattttcctgatcaatatccctatcggtctgctcggcatcttctatgcacgcaaatacatgccggacttcaccacgcccaaacgccgcttcgatttccttggttttatgctgttcggcctgagtctggtgctgatctctaccgggctggaactgtttggcgagcgggtgctggcgagctacgtttcgctgggcattctgctcagcggcttcgtgatgctgttcggctacatcgcgcacgcacgccgccaccctcagccgctgatcggtctcgacctgttcaaaacccgcaccttctcggtcggcatcgccggcaacgtcgcctctaggttgggcaccggctgcgtgccgtttttaatgccgctcatgctgcaggtgggattcggttacacggcaatcgtcgccggttgcatgatggcgccaaccgccatcggctcactgatggcgaaatccaccgtcactcaggtgctgcgctggttcggttatcgtaaaacgctggtcggcatcaccgttatcatcggggtgctgatcgcccagtttgccctgcaaagcccgggcatgccgctgtggctgatgatcctgccgctgttcgtgctgggcatggcgatgtccacccagttcaccgccatgaacaccatcagcctggcggatttgaacgacgccaacgccagcgccggcaacagcgtcctggcggtcacccaacaactgtccatcagcttcggcgtggcgatcagcgcggcggtgctgcgtttttacgaatccctgtcgttaggcaccatgatcgaccacttccactacacctttatcaccatggggatcgtcaccgtggcgtcggcgctggtgtttatgttgctgagaaggaaagatggccgcaatttgatcagcggccaggaaagcaagaaagaagcgaaggcggccagttaacggcggcccaccgaagcgcgttccaccagctcgggcgtcagcaccagcacctggggcgcgcgctccgggttttgcaggcggttgatcagcgcatcgatcgccagctcgcccaacgaatccttcggttgatgaatggtgctcagcggcggcgccagataacgcgccagctcaatatcatcgtaccccatcaccgccatatcctgcggcacggaaagcccggcctgatacagcgcctgataaacgcctaccgccaccgcgtcgttgccggcgaacaccgcatgcggcggttcgtccagcgccaacagttggcgcatggcgttcacgccgccctcaaactcaaagtcgcaatgcacttcataccctgtcggaaccggtaatccggcgcgacgcatcgcgttgcgatagccttccagccggtgacgggcggtggttttatcctgcgggccggcgatgcaggcgatcttgcggtagccgcgggcgatcagatgatcggtcgccatctcgccgcccagcagcgagttatcctgaataatatcgttcgcgccctcgaacggcgcccagtccatcatcacgatcggcaatgacgggtagcggctcagggcatcttgcgatggccggtggttttcggtgcacatcaacagcaaaccgtcgacgcgcttttgcagcagcgtctccatgctgcggttcatgcgcgcggcgtcttcttcggtattgcacaggatcagactgtagccacgttcatagcagctgcgctccacgccgcgcaccacttcagcataaaacgggttgttgctggcggtcaccagcatgccgatggtgcgggtctgattaagcttcaggctgcgcgccagcgcagaaggcgcatagttcaactgttccacggccgccatgaccttgtcgcgcacgctgtcgctgacaaagcgattgttgttgaccacatgcgaaacggtagaggttgaaacgcccgccaggcgggcgacatctttcatggtggccaaaggatcacccctgttgctgcaagaaggcgtcaatctcttcgcgccacggcaccgaaggctgcgcgccggggcgggttacggcgatcgccgccgccgcatgggcgaaacgcaccgcgtcggccatgctgttgccttccaacagggcggtcaccagcgcaccgttaaaggtatcgccggcggcgatggtatccaccgcttgcactttgaagccgggcacccgtttgccgttgccgttttcgctcagccacacgccacggctgccgagggtgatgatcaccgtcgcgatgcctttgtcgtgcagcgcctgcgccgcgcgcgccgcatcggcgtcgttgtccacagcgatgccggtcaggcgctgcgcttcggtttcattcggggtgatcatatcaatcatccccagcagctcgtccggcagctcgcgcgccggggccgggttgaggatcacttgcgtttgatgttgcttggccaagcgggcggcggcgatcaccgtctccaacggcgactccagctgcatcagcagggcatcggcgtcgatgactttttgccggtagcgcgccaggtaatccggcgttaccgcggcgttggcgccggcattgatgccgatcacgttctcgccttcggcgttgacgaagatcagcgccacgccggtggtgctgtcggcgatggcttcaatcggttgggtatcaatgcgatcgctcgccagctgccggcggacacgctcgccgatatcgtcggcgcccacgcaggcgataaaggcgatctccgccccactgcgcccggccgccaccgcctgattcgcgcccttgccgccaaacgccaccttatactgcttcccgatcaccgtttcgcccgggtgggggaattgttcaatattgaggatatggtcggcattgatgctgcccagaaccaccagcttacctgtttccatcgcattgattcctgaattgcgcgccatcgtaaacgccccgtcccgatggcgctggtatgacttactgagtgaccagtttcaaatcgaccggaatggtcgccggcactttttcgcctttcagcactttatcggcggtttccacgcctatcacgccgatctgatcgggacgctgcgccacggtcgccgccagcttgccgccttcaaccgctttcacgccgtcggcggtgccgtcgaagcctaccacgatcacgtcggttttaccggcggtttgcagcgcacgcagcgcgcccagcgccatttcatcgttctgggcaaataccgcctgcacatccgggtgagcggtcagcaggttctgcatcacgttcaggcccttggtgcggtcgaaatcggccggctggctggccagcagcttgaatttattctgatccagcgactgtttgaagccttcgccgcgttcacgcgcggcggaggtgccggcaatgccttccagctgaatcaccttggcgtcggcgcctgctttcttggcgatgaagtcgccggccattttgccgcccacgcggttatccgacgcgatgtggctcaccacttcacccttgctcgccacgcggtccagcgtgatgaccgggatcttagcctggttggccatcttgatggcgttgccgaccgcatcggagtcggtcgggttgatcagcagcagcttaggcgcccgcaccatcagatcctgcacgttggccagctctttcgccgggttgttctgggagtccagcaccaccaggttgtagcccagcttattggcctcttgctgcgctccgtccttcatcgagacgaagaacgggttgttgagagtggacaccaccagcgcgatggtctctttggccatggcattggcgctcagggtggcgctcagcgcgatggcggaggctaaggttgccagttttttcattttcatcatcgtgattcctgtagggggaggttacttgttgcttttgttatctaccagaaccgccagcagtatcaccactgccttcacgatcatttggtagtaggaagaaacacccaataaattcaggccgttgttcaggaagccgaggatcagcgccccgatcagcgtgccgacgatgcgccccttgccgccggccaggctggtgccgcccagcaccacggcggcgatggcgtccagctcatagccggtgccggcggtcggctgcgccgacgagaggcgcgctacttcgatcacccccgccagcgccgccagcaggccgcacagcgaatagacgataattttcactttatcgacgctgataccggacaggcgtgtcgccgcttcattgccgcccagggcataaatatagcggcccaggcgcgtatggtgcagcatataccaggcggcgatgaacacgatcgccatgatccagatcggcgtaggcacacccagcggacggccgatgccgaaccaaccaaaggtgtcggccacgtcggtgaaaccggtattgatcgggctgccgttggtgtacaccatggtgacgccgcgcagcagcagcatcatcaccagcgtagcgataaaggcttgcactttgcctttggcgacgatcaccccggtgcaggcgccaaccgcggcgcccagcgccaaggccgccgccaccgccaccagcgcgttgacctcaaagccgacgatcgacgccgccaccgcgccggtcagggccagcagcgatcccaccgacagatcgatgccggaagtgaggatcaccagcgtcatccccaccgccatgatggcgttgaccgaggtctgctgcagaatattgaacaggttgttcagggtgaagaagttcgggctcatggaagagaccacggcgatcagcaccagcagcgcaatcaacgacttctgctctaacagccattctttactgaaccagcgcttagctgcgatagtctgggaactcatatctgattactcctgctttacgccgtattgcttgccgacggctgccgccatcaacgcttcctgggtggcctgttcaatcgggaactcgccgctgagatgcccttcgtgcatcaccagaatgcgatcgctcatgcccatcacctccggcatttccgaagacaccagaatgatgctcagcccttcctgcttgaactggttgattaactgatagatctcttttttcgccccgacatcgacgccgcgcgtcggctcatcgaggatcagcaccttcggccgggtcatcaggccgcgggcgatcgccactttctgctgattgccgccggaaagcagacctatcggctgctccatcgacggcgttttgatattgaacaggcggatgaaatctcccaccgcctgccgctcgtcggcctgtttcaggctgccgtcggcgcggctgaagtagcgcagcgcggtcagagacatgttttccttcaccgacatgcccagcaccaggccgtcgcgcttgcggtcttccgagatatagacgatgccgttcgccaacccatcctgcggcgaatgggcgaccacctcgcggccgtccaggctgacggtgccggccttgcgcggcgcggcgccgtacaggatcttcatcaattcggtgcgcccggcgcccatcagcccggccacgccgaggatctcgccgcggtacagcgtaaagctgacgtcttcaacgccggggccggaaagatgactgacttccagccgcttttcaccacgcggcaaatccaggcgcggatattgttcttccagcttgcggccgaccatcatctcaatcagcgaatcttcctgcagctcgctcaccggccgctcggcgataaactgcccgtcgcggaacacggtcacgtcgtcgcagatttcaaagatctctttcagacggtgcgagatatagacgatgccgcgcccttcggccttcagctcattaatcaccttgaacagcgaggcggtttcggtgtcggtcagcgcatcggtcggttcgtccatgatgatcactttcgattcgaagctcagcaccttggcaatctccaccatctgctgatcgccgatcgacagctcgcccaccagccggtggctgctgtagcgcagattgaggcgcgccagcaagcgatcggcctcggcgtacatgcgcttccagtcaatgcggccgaaacggttgacgaactcgcggccgaggaagatgttttccgcaatcgtcagctgcgggatcaggttcagctcctgatgaataatgccgatgcccgcttcctgcgaatcctttggcccgttgaacgccacctctttaccgagaaaatactggctgccggcgtctttctggtagatgccggtcagcactttcatcatggtggacttcccggcgccgttttcccccaccagcgccatcaccttgccgggataaacgctgagggcagcgccggaaagcgccttcacgccgggaaaggctttatcaatccctttcagttgcagtaaaggttgcataaacgcctcagaaagttacgccggcgcacaggatcacgttcgcgtaaggcgaacactccccgctgcggatcaccgcccggctgtgctcggtttgcgctttaaacgcctgatggctgatatagcgcacgctgatggtattgccctggcgttggcccagtgcggtcagttcagccaacagagcctcgtggagcgacggattctgtttcacgatctcttccgccaggatggcgctttctacctgcatctcttgcgtgaccgccgcgaacacctgcatgaaggtcggcacgccctgcgtcaacgccagatcgatgcgctgcgtcgccgccggtatcggcaggcccgcatcgcacagggtgagctggtcggtatgccccagccgggcaatcacggcagacacgtcggaattcagtaatacgccttttttcatcttctcactccgctagcgaaacgtttcgctctctggaggagtgtaaaaaaacggcaggggaaggcaaccgggacaatgcagaagtgtgatcgttatcgaaacgtttcgttcacgcacggagaaagcgcaaacaaaaggggctcagccatgctgagcccctgtcaggcggattagatctcgacctgcgtaccgagttcgatgacccggttcggcgggatttcgaactgatccggcgcgcgcagggcattgcggctcagggcgacgaacagtttgccgcgcaggtagaggtaccacggccgcttggtgaggatcagcgattcatgggacatgaagaacgacgtctccgacatgcggcacggcaacccttccagcccgcagcggtggaacacttcctcgacgttcggcgtttcgcgccagccgtagctggccaccacccgccagaaggtcggcgacagctgctcgatggtcacccggcgcacgttgtgcacgtaaggcgcatcctcggtgcgcagcgtcagcagcaccacgcgctcgtgcagcaccttgttgtgcttcaggttgtgcaacagcgcaaaaggaatgacgttggtggcgcgcgacaagaagaccgcggtgcccggcacccgtaccggcggcgatttctccagcgaggcaatcatcgcctccagcgagttgccgtgttcatgcaggcggcgcagcaagcggaagcgctcgctcttccaggtagtcataatgatgaacatcaccagcgccagggtcagcggcagccagccgccggagaacagcttcagggcgttggcagagaacatcggcacgtcgatgatcagcaagatggttacgatgccgatcgccaggaagcggttccagtgccagttattaatcgccaccgaagtgaccagaatgctggtcagcaccatggtgccggtgacggcgataccgtacgccgccgccaggttgctggagtgctcgaagccgatgatcaccagcaccaccgagatgtacagcgtccagttgatcaccggaatgtagatctggccggattccatttccgaggtgtgaatgatgcgcatcggcgacagatagcccaggcgcaccgcctggcgagtcagcgagaagacgccggaaatcaccgcctgcgaagcgatcaccgtcgccagggtcgccagaatcagcagcgggatcagcgcccaatcgggcgccagcaggaagaacgggtttttgatcgcctccggatttttcagcagcagcgcgccctggccgaaatagttgagcaccagcgaaggcagcaccacggtgaaccaggccaggcggatcgggaacttgccgaagtgccccatgtcggcatacagcgcctcaacgccggtgatcgacagcaccaccgcacctaacgcaaagaacgataccttcttatattccataaagaagttgagcgcccatttggggttcagcgcctgcagcacttccgggttcgatatgatgctgcgcgcgcccagcaccgccaacacgatgaaccacagcagcatcaccggggcgaacagcttgccgacgctgccggtgccgtgcttttgaatgacgaacagcagcgtcaacaccagaatggagagcggcacgatataggcatcgagcgcaggggcggcgatttccaacccttctatcgccgacatcaccgagatcgccggggtgatcaccacctcgccatagaagaagctgccgccgatcagacccagtatcaccagcaccgccgtggtgcgcgccgaggtattgcgcccggccagcgacatcagcgtcagaataccgccctcgccggcgttatccgcgcgcatcacgtaggtgagatatttgagggaaacgatcacgatcagcatccagaaaatcagcgacaggaagccgaaaaccacgtctggacgaacatcgaagccgtaatggccggagaaacactctctcagcgtatagagagggctggtgccaatatcaccgtagaccacgccgatggcagccagggttaccgccgataaggactgcttatgctctgcgctcataattcgtttctttatcagaacatccgttagcgatgcatccgcatcaggcaaaatacgggctcaaagatccgtcacgcccaccagaaagccgcacagtatgcaccatttataccgcttgcctacccttatatcagagccgaaaaataaacaaaatgtgaaccgaatatccggcttaacgtagaaaaatattactaatcaacgggctataccactaaaaataatggtggtttatcatcggattatcgaccaagattggctaactctcggacaatgcgacaattatatgacgccatcatcccttctggcagaacgaatttcccgcctcagcagcgcgctggagagcggtctttatgagcggcaagaggcaatccgtctgtgcctgctggcggcgctgagcggcgaaagcgtattcctgctcggcccacccggcatcgccaagagcctgatcgcgcgccggttgaagtttgccttccgcaacgcccgctcctttgaatacctgatgacgcgtttttccacgccggaagaggtcttcggcccgctctctatccaggcgctgaaagatgaggggcgctatcagcgtctgaccgccggctatctgccggaagcggagatcgtgtttctggacgagatctggaaggccggcccggcgatcctcaacaccctgctgacggcgatcaacgaacgccgctttcgcaacggcaacagcgaagaaccgatcccgctgcgcctgctggtcaccgcctccaacgaactgcccgaagcggacagcagcctcgaagccctgtatgaccgcatgctgatccgcctgtggctggacaaggtgcaggataaacagaatttccgctcgctgctggtcaaccgccagagcgaaagccaaaacccggtgccggcggcgctgagcatcagcgacgaagagtttctgcagtggcagccgcagatcgataaggtggcgctgccggaagcctgctttgagctgattttccaactgcgccagcggctggacgcgctggaacaggcgccgtacgtctccgatcgacgctggaaaaaagccctgcgcctgctgcaggcctgcgccttcttcagcgggcgcgacgccatcgccccgctcgatctgatgctgttgaaggactgcctgtggcacgatctcacctcgctgaaactgctgcaacagcagatcgatcagctgctgaccgagtcggcctatcagcagcagtcgatgctgatccagttgcaacaaatccacacccgctggctgcaggaccagcagcaacaaagcgaccggcaggccatcagcctggtgaaaaaaggcggcatgttcagccgcaaaccgcaatacgcgccggccacgccgttcgccggcggccccctcactctgctgttgcaaaagccgctgcagctgcatgacattcaggtcaaccatctgagcatcgaaagcagcgcgctggacaactggctgcaaaaaggcggcgacgtgcgcgccaagctgaacggcatcggctttgcgcagccgatcgacctggaagtggatgaccaactgcacctcacggtgttggacgtcagccgccagccgtcattactggcgctgccgggcaaacaggccaccgccacgccgcaggcgctgctggatgaaatggacggattggcccagcgcctggcggagcaacgccgcgccttcagccaacatcagccctgtctgttcacccccgccgccggcctggccaagatcgaagccagtctgctgcaggtcgcggaacaggttaaacagcaactgcagcaaatgcgcggccagtaaccatgctcagtctggagacgctcgatctgctgctggcgatcaccgaaggcgagatgatcgaggagatgatcgtcggcatgctggcggcgccgcagctgtcggtattctttaaaaagtttccggcccttcgccgggcgctggatcgcgatctgccgcgttggaagctgcagctcaaggagcgtctgcaggaggcgatggtgccgccggcgctggcgcaggaattctatcgctaccagcagtgccagctggagaacaacacccagttttatcacaacctcaacgacaccatggagctgctgcgccagctggtctcaccgttttatgaacaggcgcgcgcgctggtggacgccgccgatctgcccaatcatccgctggacgacagctttcaaacgctgtttctgcagcgctggcgcatcagcctgacgctacaggccaccatgctgcaccaccaactgctggaacaagagcgcgagcagctgatggcggaactgcaggagcggttggcgctgagcggcgcgctggaaccgctgctgtcggaaaacgacaccgccgccggcaggctgtgggacatgagcaaaggccagctgcagcgtggcgattatcagcggctggtggagtacggcaactttttgcagcagcagccggagctgaaaaaactggcgcaacagctgggccgcagctatcaggccaaggcggtgcagcaacaggacgcgcagccggagccgttcagggtcatggtgcaggtgccggccacgctgccggaagaagtgagcggcattcatcagagcgacgacattctgcgcctgctgccgccggagctggcgacgctggggatagaagagctggaattcgagttttatcgccgcctgttggaaaagcggctgctgagctaccgtctgcagggcgacgtctggcaggaacagatcctgatccgccaggtcactcaccagcagcaggatcaacagccgcgcgggccgtttatcgtctgcgtggacacctccggatcgatgggcggtttcaacgaacagtgcgccaaggcgttctgtctggcgctgctgcgcattgcgctggcggacaaccgccgctgctatatcatgctgttcgccaaccagatcgtgcattacgaactcaccgccgccagcggcatcgagcaggcagtgcgctttctcggccagcagtttcgtggcggcaccgatctggcggcctgcctgaacgccaccgtcaccaaaatggcggagagcggctggttcgacgccgatgcggtgatcatttccgattttattgcccagcggttgccggaggaggtaataaagaaggtgaaacagcagcagcaaagccaccagcaacgtttccacgcggtggcgatgtccgcctacggcaaacccggcatcatgcgcatcttcgatcatatctggcgctttgataccgggctgaaaagccgtttgatgcgccgctggcggcgctaggcgggattagagcagaccttcaaccgcgccgcgcacttccggcgaccacacgccgcattgcacctggccgatatgcgacagttgcagcaacaacatcaccagacgcgactgaccgatgccgccgccgatggtctgcggcatatcgccgcgcagcaaggactggtgccattccaacgccatgcgctcttcatcgccggtcagcgccagctggtgtttcagcgcggcggcgtcaacgcggatccccatggaggacagctcgaaagcgtcctgcagcaccgggttccacaccacgatatcgccgttcaggcccgccaggccatccgccgtcggcgtggtccagtcatcataatccggcgcccgcacatcgtgcgatttaccgtgtgacagcttgccgccgatgccaatcaggaacactgcgcccaattctttggcgatcgcccgctcgcgccccttggcgtccagatccggatagcgctgcagcagggtttcgctgtgcacgaagtggatctgttccggcaggaacggggtcaggccatgctcgcggctgacttccgcctccgtcgccttgatcgcagcgtaaatgctgcgcacggtgtttttcaggtagtccaggctgcgttcaccatcgcccatcacccgttcccagtcccactgatcgacgtacaccgagtggataggcgtcaggcggtcttcatccgggcgcagcgccttcatatgggtatacaggccttcgccggcaccgaaatcgtagctacccagggttttgcgtttccatttcgccagcgaatgcaccacttcgaaggtggcgtccggcaaggttttgactttgacctgcaccgctttctcgctgccggaaaggttatcctgcgtgccatcgcccaggcggctaaggatcggggcttgcacttcgatcagaccgagctgttgctccagctggcgggagaagaaggatttgacctggctgatttgttgttgtttttggataaactgttttttcattgccgtatctcttgtaaacctgtctctgttgccatcgattaagcaacaaaatgacacaacaattcaatatccattaatcaatattgccttttcacttttaatcgttcatttttacccggacagaattcaacaatcgttaattaatgggggattaaatggcggaaatttatcagatcgataatctcgatcgcggcattctcaacgccctgatggacaatgcgcgcacaccgtacgccgaactggcgaaaaacttcgccgtcagccccggcaccattcatgtgcgggtggagaagatgaagcaggccgggatcatcaccggcgcgcgcatcgacgtcagccccaaacagctgggctacgacgtgtgctgctttatcggcatcatattaaagagcgccaaggattacccttcggcgctgaagaagctggaaagcctggaagaagtggtggaagcctattacaccaccggccactacagcgtctttattaaagtcatgtgccgctcgatcgacgcgttgcagcaagtacttatcaacaagatccagaccatcgacgagatccagtccaccgaaacgctgatctcactgcagaaccccattatgcgcaccatcgtgccgtaacccgccaaattgcatacccacattatccacaggtagatcccagccgattcacagcgtacaatgcagccactttgagtgagaaggttgggatcgttggttcatggcagacattactctgatcagtggcagtacgcttggcagtgccgaatacgtggctgaacatttggctgaaaagctggaagacgccggcttctctaccgagatgctgcacggccctgaactggatgaactgccgttgaacggccgctggctggtggtctcttccacgcacggcgccggcgaactgccggataaccttcagccgctgttggaacagatcgctgagcagcagccggatctttccgaggtgcagttcggcgccgtcggtttgggcagttcggaatacgacaccttctgcggcgcgatcaaacagatcgacgatctgttgatcgccagaggcgctaaaaggatcggcgatcgtctcgagatcgacgtgaccgagcatgaaattcccgaggatccggccgaggaatgggtaaaaaactggattaatttactctaattcgtctaaagatcgcgcgaacgattgtggataactaagcttaaaagcagggtaaaagccgtagttatcccaataacaaccgtagagcgctttttgtcctgtgcataacaagccttttagatcccagcttatctgcgtcgggatcaccgatcattcacagcaaacgatcctccttaatctgctgatcttcatcgtgaatagtcacttatccacagaggatctcgatcctaataagagatctaataaagagatctttaaataaaaaagatcttcttttaattaccgacgatcctgaccacttggtcgatcgtctaaacttgagtagaatccccgaccccagggcaaatacgatcgttcgcaatacggcgaggtgcagttccatgttttatccagatcaatttgacgtcatcatcatcggtggtggccatgcaggtaccgaggccgccatggccgcggcgcgcatgggacgtcagactttattattgacacacaatatcgatacgctgggacagatgtcctgtaacccggcgattggcggtattggtaaagggcatctggttaaggaaattgatgcgctcggcggcctgatggcaacggcgatcgaccatgccggcatccagtttaggatactaaacgccagcaaaggccctgctgttcgcgccactcgggctcaggcggatcgcgtcctgtatcggcaggcgatccgtaccgcgttggagaaccagcccaacctgatgatcttccaacagccggttgaggatctgatcgtcgaaaacgatcgcgtcgtgggcgccgtcacccaaatgggtctgaaattccgcgccaaggcggtggtattgaccgtaggcaccttcctggacggcaagatccatatcggtctggagaattacagcggcggccgcgccggggatcctccttcgatctcgctgtcacagcgtttgcgtgaactgccgctgcgcgttaaccgcttgaaaaccggtacgccgccgcgcatcgacgcccgcactatcgatttcagcgtattggcacctcaacacggcgatacgccggtgccggtattctcgttcctgggcgatgccagccagcacccggaacaaatggcgtgctacatcacccacaccaatgaaaaaacccatgacgtgatccgcaataacctcgatcgcagcccgatgtatgccgggatcatcgaagggatcggcccacgttactgtccgtcgatcgaagacaaggtcatgcgttttgccgatcgcaacgcgcaccagatcttccttgagccggaaggcctgaccagcaacgagatttaccctaacgggatctccaccagcctgccgttcgacgtgcagatgcagatcgtccgttcaatggaagggatgcagaacgcgcgtattattcgccctggttatgccatcgagtacgatttcttcgatccacgcgatctgaaaccgacgctggaaagtaaatttattcagggcctgttcttcgccggccagatcaacggcaccaccggctatgaagaagccgccgctcagggcctgctggccggtctgaacgccggccgcttcgccgatgaacaagagggctgggcgccacgtcgcgatcaggcctacctcggcgtgctggtggacgatctcagcaccctcggcaccaaagaaccgtaccgcatgtttacctcacgcgccgagtatcgtctgatgctgcgcgaagacaacgccgatctccgcctgacggaaaaaggccgtgaactcggtctggtggacgacgtgcgctgggcgcgctacagcgaaaagctggagcggatcgaacgtgaacgtcagcgcctgcgcgacatctggatgcacccgcatgccgagaacgtcgaacaggtcaatgcgttgctgaaagcgccgctgtcgcgtgaagcgaacggcgaagagttgctgcgccgtcctgagatggattacgcgcaattgaccggcatcgacgccttcgcgccgccgttggacgacgaacaagccgccgagcaggtcgagatccaggtcaaatacgaaggctatatcgctcgccagcaggaagagatcgaaaaacagcagcgcaacgagaacaccgtgctgccgctggatcttgactaccgtcaggtttcggggctgtcgaacgaagtgatcgccaagctgaacgatcacaaaccgaactccatcggccaggcttcgcgcatctccggcattacaccggcggcgatctcgattttgctgatctggctgaaaaagcagggactgctgcgccgcagcgcataaatcccgcatccaggcggccgtttgctcaacccgtagccaaacggccgctgacatcacttgcgccctgaattatcatagtcgcctcattgcgccagctaaccatccgctggtcgttcagcgcctgccagaggatccgttgtgcaaaaaaaattagactcgctgctcgcggcagcaggcattgagctgcccgatcagcagaaacagcagctgctgggctatgtcggcatgctggataagtggaacaaggcttataacctcacgtcggtgcgcgatccgcagcaaatgctggtgcgccacatcctcgacagtattgtggtcaatccgcatctgcagggctcgcgttttatcgatgtcggcaccggccccggcttgccgggcattccgctggcgattgtgcgcccggatgcgcatttcacgctgctcgacagcctgggcaagcgcgtgcgtttcctgcgccaggtgcagcatgagctgggcctgaacaatatcgagccggtgcagagccgcgtcgaagcgtttccggccgagccaccgttcgatggcgtgatcagccgggcattcgcttcgctgcaggatatgctgtcctggtgccatcacctgccggcgaaagggcaggggcgtttttacgcgttgaaaggcgtgcgcccggatgaagaactgacgcagctgccggctggcgttagcctggagtctatcgtgcggctgcaggtgcctgaactggaaggcgaacgtcatctggtgattcttaaggcaaactgagtttgcttttgatcaaacaagcgtgaattaaaggtcgtacccagcagaaagataagcaggctaattagttggtcgc
